(19) United States
(12) Patent Application Publication
(10) Pub. No.: US 2002/0081668 A1
(43) Pub. Date: Jun. 27, 2002

(54) Novel murine polynucleotide sequences and mutant cells and mutant animals defined thereby

(76) Inventors: Glenn Friedrich, Houston, TX (US); Brian Zambrowicz, The Woodlands, TX (US); Arthur T. Sands, The Woodlands, TX (US)

Correspondence Address: LEXICON GENETICS INCORPORATED, 4000 RESEARCH FOREST DRIVE, THE WOODLANDS, TX, 77381, US

(21) Appl. No.: 09/728,446

(22) Filed: Nov. 30, 2000

Related U.S. Application Data
(60) Provisional application No. 60/168,270, filed on Dec. 1, 1999.
(60) Provisional application No. 60/109,302, filed on Nov. 20, 1998.

(51) Int. Cl. C12Q 1/68; C12P 19/34; C07H 21/04

(52) U.S. Cl. 435/91.2; 536/23.1; 435/6

(57) ABSTRACT

Novel murine polynucleotides are disclosed that individually identify novel genes into which a retroviral gene trap vector has integrated. Additionally, novel mutated murine ES cells are described that stably incorporate retroviral gene trap constructs into the specifically identified genes. The novel genes and cells thus defined are useful in functional genomic analysis, and in the discovery and development of new therapeutic and diagnostics agents and methods.

[0001] The present application claims the benefit of U.S. Provisional Application Ser. No. 60/168,270, filed Dec. 1, 1999, herein incorporated by reference, and further incorporates by reference U.S. application Ser. Nos. 08/726,867, 08/728,963, 08/907,598, 08/942,806, 60/109,302, 09/276,533 and U.S. Pat. No. 6,080,576 which issued Jun. 27, 2000 and their respective disclosures in their entirety.

### 1.0. FIELD OF THE INVENTION

[0002] The present invention is in the field of molecular genetics. The application discloses novel nucleic acid sequences that: each define the locus of a corresponding mutated murine embryonic stem cell clone, partially define the scope of exons that can be trapped and identified by the disclosed vectors/methods, and that are also useful, inter alia, for identifying the coding regions of the murine genome.

### 2.0. BACKGROUND OF THE INVENTION

[0003] Most mammalian genes are divided into exons and introns. Exons are the portions of the gene that are spliced into mRNA and encode the protein product of a gene. In genomic DNA, these coding exons are divided by noncoding intron sequences. Although RNA polymerase transcribes both intron and exon sequences, the intron sequences must be removed from the transcript so that the resulting mRNA can be translated into protein. Accordingly, all mammalian, and most eukaryotic, cells have the machinery to splice exons into mRNA. Gene trap vectors have been designed to integrate into introns or genes in a manner that allows the cellular splicing machinery to splice vector encoded exons to cellular mRNAs. Commonly, gene trap vectors contain selectable marker sequences that are preceded by strong splice acceptor sequences and are not preceded by a promoter. Thus, when such vectors integrate into a gene, the cellular splicing machinery splices exons from the trapped gene onto the 5′ end of the selectable marker sequence. Typically, such selectable marker genes can only be expressed if the vector encoding the gene has integrated into an intron. The resulting gene trap events are subsequently identified by selecting for cells that can survive selective culture.

[0004] Gene trapping has generally proven to be an efficient method of mutating large numbers of genes. The insertion of the gene trap vector creates a mutation in the trapped gene, and also provides a molecular tag for ease of identifying the gene that has been trapped. When ROSA Bgeo was used to trap genes it was demonstrated that at least 50% of the resulting mutations resulted in a phenotype when examined in mice. This indicates that the gene trap insertion vectors are useful mutagens. Although a powerful tool for mutating genes, the potential of the method has historically been limited by the difficulty in identifying the trapped genes. Methods that have been used to identify trap events rely on the fusion transcripts resulting from the splicing of exon sequences from the trapped gene to sequences encoded by the gene trap vector. Common gene identification protocols used to obtain sequences from these fusion transcripts include 5′ RACE, cDNA cloning, and cloning of genomic DNA surrounding the site of vector integration. However, these methods have proven labor intensive, not readily amenable to automation, and generally impractical for high-throughput.

[0005] More recently, vectors have been developed that rely on a new strategy of gene trapping that uses a vector that contains a selectable marker gene preceded by a promoter and followed by a splice donor sequence instead of a polyadenylation sequence. These vectors do not provide selection unless they integrate into a gene and subsequently trap downstream exons which provide a polyadenylation sequence. Integration of such vectors into the chromosome results in the splicing of the selectable marker gene to 3′ exons of the trapped gene. These vectors provide a number of advantages. They can be used to trap genes regardless of whether the genes are normally expressed in the cell type in which the vector has integrated. In addition, cells harboring such vectors can be screened using automated (e.g., 96-well plate format) gene identification assays such as 3′ RACE (see generally, Frohman, 1994, PCR Methods and Applications, 4: S40-S58). Using these vectors it is possible to produce large numbers of mutations and rapidly identify the mutated, or trapped, gene by DNA sequence analysis.

### 3.0. SUMMARY OF THE INVENTION

[0006] The subject invention provides numerous isolated and purified mammalian, particularly murine, cDNAs produced using gene trap technology. The OMNIBANK gene trapped sequences (GTSs) of the subject invention are disclosed as SEQ ID NOS: 1-1,461 in the appended Sequence Listing.

[0007] The subject invention contemplates the use of one or more of the subject GTSs, or portions thereof, to isolate cDNAs, genomic clones, or full-length genes/polynucleotides, or homologs, heterologs, paralogs, or orthologs thereof, that are capable of hybridizing to one or more of the disclosed GTSs under stringent conditions.

[0008] The subject invention additionally contemplates methods of analyzing biopolymer (e.g., oligonucleotides, polynucleotides, oligopeptides, peptides, polypeptides, proteins, etc.) sequence information comprising the steps of loading a first biopolymer sequence into or onto an electronic data storage medium (e.g., digital or analogue versions of electronic, magnetic, or optical memory, and the like) and comparing said first sequence to at least a portion of one of the polynucleotide sequences, or amino acid sequence encoded thereby, that is first disclosed in, or otherwise unique to, SEQ ID NOS: 1-1,461. Typically, the polynucleotide sequences, or amino acid sequences encoded thereby, will also be present on, or loaded into or onto a form of electronic data storage medium, or transferred therefrom, concurrent with or prior to comparison with the first polynucleotide.

[0009] Another embodiment of the claimed invention is the use of a oligonucleotide or polynucleotide sequence first disclosed in at least a portion of at least one of the GTS sequences of SEQ ID NOS: 1-1,461 as a hybridization probe. Of particular interest is the use of such sequences in conjunction with a solid support matrix/substrate (resins, beads, membranes, plastics, polymers, metal or metallized substrates, crystalline or polycrystalline substrates, etc.). Of particular note are spatially addressable arrays (i.e., gene chips, microtiter plates, etc.) of polynucleotides wherein at least one of the polynucleotides on the spatially addressable array comprises an oligonucleotide or polynucleotide sequence first disclosed in at least one of the GTS sequences of SEQ ID NOS: 1-1,461.

[0010] Moreover, an oligonucleotide or polynucleotide sequence first disclosed in at least one of the GTS sequences of SEQ ID NOS: 1-1,461 can be incorporated into a phage display system that can be used to screen for proteins, or other ligands, that are capable of binding an amino acid sequence encoded by an oligonucleotide or polynucleotide sequence first disclosed in at least one of the GTS sequences of SEQ ID NOS: 1-1,461.

[0011] An additional embodiment of the present invention is a library comprising individually isolated linear DNA molecules corresponding to at least a portion of the described GTSs which are useful for synthesizing physically contiguous sequences of overlapping related GTSs by, for example, the polymerase chain reaction (PCR).

[0012] The subject invention also provides for an oligonucleotide hybridization probe comprising sequence that is identical or complementary to a portion of a sequence that is first disclosed in, or preferably unique to, at least one of the GTS polynucleotides the sequence listing. The oligonucleotide probes will generally comprise between about 8 nucleotides and about 80 nucleotides, preferably between about 15 and about 40 nucleotides, and more preferably between about 20 and about 35 nucleotides.

[0013] The subject invention also provides for an antisense molecule which comprises at least a portion of sequence that is first disclosed in, or preferably unique to, at least one of the GTS polynucleotides.

[0014] The subject invention also contemplates a purified polypeptide in which at least a portion of the polypeptide is encoded by, and thus first disclosed by, at least a portion of a GTS of the present invention.

[0015] The subject invention further contemplates a mutated ES cell, or a mutated cell, tissue, or animal derived therefrom, that stably incorporates a gene trap vector into a specifically identified gene or a gene comprising one or more of the disclosed GTS polynucleotide sequences.

[0016] In summary, the unique sequences described in SEQ ID NOS:1-1,461 are usefull for the identification of coding sequence and the mapping of a unique gene to a particular chromosome. These novel sequences can also be used in addressable arrays, such as gene chips, to identify and characterize temporal and tissue specific gene expression. When the unique sequences described in SEQ ID NOS:1-1,461 are expressed in mouse embryonic stem cells (“ES cells”) these novel sequences provide a method of identifying phenotypic expression of the a particular gene as well as a method of assigning function to preveously unknown genes. The unique sequences described in SEQ ID NOS: 1-1,461 can be further used to identify the gene of interest from many sources including, but not limited to, libraries consisting of cDNA or genomic clones and for the in silico screening of nucleic acid and protein databases. Additionally, SEQ ID NOS: 1-1,461 can be incorporated into a phage display system and used to screen for proteins, or other ligands. The unique sequences described in SEQ ID NOS: 1-1,461 have further utility for genetic manipulations such as antisense inhibition and gene targeting.

### 4.0. DESCRIPTION OF THE SEQUENCE LISTING AND FIGURES

[0017] The Sequence Listing is a compilation of nucleotide sequences obtained by sequencing a gene trap library that at least partially identifies the genes in the target cell genome that can be trapped by the described gene trap vectors (i.e., the repertoire of genes that are active, or have not been inactivated, with the tested ES cell population). The Sequence Listing was prepared using the conventions described in the 1996 edition of the 37 C.F.R. sections 1.801-1.825, and/or WIPO Standard ST.25 as referenced by the 1999 edition of 37 C.F.R. sections 1.801-1.825

[0018] FIGS. 1A-1C present a diagrammatic representation of representative gene trap vectors used to generate the described sequences.

### 5.0. DETAILED DESCRIPTION OF THE INVENTION

[0019] The current invention relates to novel polynucleotides which are expressed in mouse embryonic stem cells (“ES cells”) and which provide unique tools for gene discovery, diagnostic gene expression analysis, cross species hybridization analysis, and for genetic manipulations using a variety of techniques known to those skilled in the art, like, for example, antisense inhibition, gene targeting, etc. Furthermore, the expression of these novel polynucleotides in ES cells suggests their involvement in developmental and cell differentiation processes, making them good candidates to treat disorders and abnormalities affecting development and cell differentiation.

[0020] Additionally, because they are totipotent, the disclosed mutated ES cells (Lex-1 cells from murine strain A129) can be microinjected into blastocysts, introduced to pseudopregnant host animals, and the offspring bred to produce mutated animals as described, for example, in “Mouse Mutagenesis”, 1998, Zambrowicz et al., eds., Lexicon Press, The Woodlands, Tex., and periodic updates thereof, and U.S. patent application Ser. No. 08/943,687 both of which are herein incorporated by reference. Consequently, an additional aspect of the subject invention are mutated mammalian, and preferably murine, cells that have been mutated by a process involving the use genetically engineered vectors or nucleotides to alter the naturally occurring function, sequence, or expression of a genetic locus encoding a novel portion of sequence (e.g., an exon, oligonucleotide sequence, splice junction, etc.) presented in one of the presently described GTSs.

### 5.1. Polynucleotides of the Present Invention

[0021] The nucleotide sequences of the various isolated GTSs of the present invention appear in the Sequence Listing as SEQ ID NOS: 1-1,461. Additional embodiments of the present invention are GTS variants, or homologs, paralogs, orthologs, etc., which include isolated polynucleotides, or complements thereof, that hybridize to one or more of the disclosed GTSs of SEQ ID NOS: 1-1,461 under stringent, or preferably highly stringent, conditions.

[0022] By way of example and not limitation, high stringency hybridization conditions can be defined as follows: Prehybridization of filters containing DNA to be screened is carried out for 8 h to overnight at 65° C. in a buffer containing 6× SSC, 50 mM Tris-HCl (pH 7.5), 1 mM EDTA, 0.02% PVP, 0.02% Ficoll, 0.02% BSA, and 500 μg/ml denatured salmon sperm DNA. Filters are hybridized for 48 h at 65° C. in prehybridization mixture containing 100 μg/ml denatured salmon sperm DNA and 5-20×10⁶ cpm of ³²P-labeled probe (alternatively, as in all hybridizations described herein, approximately 42, 44, 46, 48, 50, 52, 54, 56, 58, 62, 64, 66, 68, 70, or about 72 degrees or more can be used). The filters are then washed in approximately 1× wash mix (10× wash mix contains 3M NaCl, 0.6M Tris base, and 0.02M EDTA, alternatively, as with all washes described herein, 2×, 3×, 4×, 5×, 6× wash mix, or more, can be used) twice for 5 minutes each at room temperature, then in 1× wash mix containing 1% SDS at 60° C. (alternatively, as in all washes described herein, approximately 42, 44, 46, 48, 50, 52, 54, 56, 58, 62, 64, 66, 68, 70, or about 72 degrees or more can be used) for about 30 min, and finally in 0.3× wash mix (alternatively, as in all final washes described herein, approximately, 0.2×, 0.4×, 0.6×, 0.8×, 1×, or any concentration between about 2× and about 6× can be used in conjunction with a suitable wash temperature) containing 0.1% SDS at 60° C. (alternatively, approximately 42, 44, 46, 48, 50, 52, 54, 56, 58, 62, 64, 66, 68, 70, or about 72 degrees or more can be used) for about 30 min. The filters are then air dried and exposed to x-ray film for autoradiography. In an alternative protocol, washing of filters is done for 37° C. for 1 h in a solution containing 2× SSC, 0.01% PVP, 0.01% Ficoll, and 0.01% BSA. This is followed by a wash in 0.1× SSC at 50° C. for 45 min before autoradiography. Another example of hybridization under highly stringent conditions is hybridization to filter-bound DNA in 0.5 M NaHPO₄, 7% sodium dodecyl sulfate (SDS), 1 mM EDTA at 65° C., and washing in 0.1× SSC/0.1% SDS at 68° C. (Ausubel F. M. et al., eds., 1989, Current Protocols in Molecular Biology, Vol. I, Green Publishing Associates, Inc., and John Wiley & sons, Inc., New York, at p. 2.10.3).

[0023] Additionally contemplated are GTS polynucleotides that are at least about 99, 95, 90, or about 85 percent similar to corresponding regions of one of SEQ ID NOS: 1-1,461 (as measured by BLAST sequence comparison analysis using, for example, the GCG sequence analysis package using default parameters).

[0024] Preferably, such GTS variants will encode at least a portion or domain of a, preferably naturally occurring, protein or polypeptide that encodes a functional equivalent to a protein or polypeptide, or portion or domain thereof, encoded by the disclosed GTSs. Additional examples of GTS variants include polynucleotides, or complements thereof, that are capable of binding to the disclosed GTSs under less stringent conditions, such as moderately stringent conditions, (e.g., washing in 0.2× SSC/0.1% SDS at 42° C. (Ausubel et al., 1989, supra). Moderately stringent conditions can be additionally defined, for example, as follows: Filters containing DNA are pretreated for 6 h at 55° C. in a solution containing 6× SSC, 5× Denhart's solution, 0.5% SDS and 100 μg/ml denatured salmon sperm DNA. Hybridizations are carried out in the same solution and 5-20×10⁶ cpm ³²P-labeled probe is used. Filters are incubated in hybridization mixture for 18-20 h at 55° C. (alternatively, as in all hybridizations described herein, approximately 42, 44, 46, 48, 50, 52, 54, 56, 58, 62, 64, 66, 68, 70, or about 72 degrees or more can be used in combination with a suitable concentration of salt). The filters are then washed in approximately 1× wash mix (10× wash mix contains 3M NaCl, 0.6M Tris base, and 0.02M EDTA, alternatively, as with all washes described herein, 2×, 3×, 4×, 5×, 6× wash mix, or more, can be used) twice for 5 minutes each at room temperature, then in 1× wash mix containing 1% SDS at 60° C. (alternatively, as in all washes described herein, approximately, 42, 44, 46, 48, 50, 52, 54, 56, 58, 62, 64, 66, 68, 70, or about 72 degrees or more can be used) for about 30 min, and finally in 0.3× wash mix (alternatively, as in all final washes described herein approximately 0.2×, 0.4×, 0.6×, 0.8×, 1×, or any concentration between about 2× and about 6× can be used in conjunction with a suitable wash temperature) containing 0.1% SDS at 60° C. (alternatively, approximately 42, 44, 45, 48, 50, 52, 54, 56, 58, 62, 64, 66, 68, 70, or about 72 degrees or more can be used) for about 30 min. The filters are then air dried and exposed to x-ray film for autoradiography.

[0025] In an alternative protocol, washing of filters is done twice for 30 minutes at 60° C. in a solution containing lx SSC and 0.1% SDS. Filters are blotted dry and exposed for autoradiography.

[0026] Other conditions of moderate stringency which may be used are well-known in the art. For example, washing of filters can be done at 37° C. for 1 h in a solution containing 2× SSC, 0.1% SDS. Another example of hybridization under moderately stringent conditions is washing in 0.2× SSC/0.1% SDS at 42° C. (Ausubel et al., 1989, supra). Such less stringent conditions may also be, for example, low stringency hybridization conditions. By way of example and not limitation, procedures using such conditions of low stringency are as follows (see also Shilo and Weinberg, 1981, Proc. Natl. Acad. Sci. USA 78:6789-6792): Filters containing DNA are pretreated for 6 h at 40° C. in a solution containing 35% formamide, 5× SSC, 50 mM Tris-HCl (pH 7.5), 5 mM EDTA, 0.1% PVP, 0.1% Ficoll, 1% BSA, and 500 μg/ml denatured salmon sperm DNA. Hybridizations are carried out in the same solution with the following modifications: 0.02% PVP, 0.02% Ficoll, 0.2% BSA, 100 μg/ml salmon sperm DNA, 10% (wt/vol) dextran sulfate, and 5-20×10⁶ cpm ³²P-labeled probe is used. Filters are incubated in hybridization mixture for 18-20 h at 40° C. (alternatively, as in all hybridizations described herein, approximately 42, 44, 46, 48, 50, 52, 54, 56, 58, 62, 64, 66, 68, 70, or about 72 degrees or more can be used). The filters are then washed in approximately 1× wash mix (10× wash mix contains 3M NaCl, 0.6M Tris base, and 0.02M EDTA, alternatively, as with all washes described herein, 2×, 3×, 4×, 5×, 6× wash mix, or more, can be used) twice for five minutes each at room temperature, then in 1× wash mix containing 1% SDS at 60° C. (alternatively, as in all washes described herein, approximately 42, 44, 46, 48, 50, 52, 54, 56, 58, 62, 64, 66, 68, 70, or about 72 degrees or more can be used) for about 30 min, and finally in 0.3× wash mix (alternatively, as in all final washes described herein, approximately, 0.2×, 0.4×, 0.6×, 0.8×, 1×, or any concentration between about 2× and about 6× can be used in conjunction with a suitable wash temperature) containing 0.1% SDS at 60° C. (alternatively, approximately 42, 44, 46, 48, 50, 52, 54, 56, 58, 62, 64, 66, 68, 70, or about 72 degrees or more can be used) for about 30 min. The filters are then air dried and exposed to x-ray film for autoradiography. In yet another alternative protocol, washing of filters is done for 1.5 h at 55° C. in a solution containing 2× SSC, 25 mM Tris-HCl (pH 7.4), 5 mM EDTA, and 0.1% SDS. The wash solution is replaced with fresh solution and incubated an additional 1.5 h at 60° C. Filters are then blotted dry and exposed for autoradiography. If necessary, filters are washed for a third time at 65-68° C. and reexposed to film. other conditions of low stringency which may be used are well known in the art (e.g., as employed for cross-species hybridizations). Preferably, GTS variants identified or isolated using the above methods will also encode a functionally equivalent gene product (i.e., protein, polypeptide, or domain thereof, encoding or otherwise associated with a function or structure at least partially encoded by the complementary GTS).

[0027] Additional embodiments contemplated by the present invention include any polynucleotide sequence comprising a continuous stretch of nucleotide sequence originally disclosed in, or otherwise unique to, any of the GTSs of SEQ ID NOS: 1-1,461 that are at least 8, or at least 10, or at least 14, or at least 20, or at least 30, or at least about 40, and preferably at least about 60 consecutive nucleotides up to about several hundred bases of nucleotide sequence or an entire GTS sequence. Functional equivalents of the gene products of SEQ ID NOS: 1-1,461 include naturally occurring variants of SEQ ID NOS: 1-1,461 present in other species, and mutant variants, both naturally occurring and engineered, which retain at least some of the functional activities of the gene products of SEQ ID NOS: 1-1,461.

[0028] The invention also includes degenerate variants of the claimed GTS sequences, and products encoded thereby. The invention further includes GTS derivatives wherein any of the disclosed GTSs, or GTS variants, is linked to another polynucleotide molecule, or a fragment thereof, wherein the link may be either directly or through other polynucleotides of any sequence and of a length of about 1,000 base pairs, or about 500 base pairs, or about 300 base pairs, or about 200 base pairs, or about 150 base pairs, or about 100 base pairs or about 50 base pairs, or less.

[0029] The invention also particularly includes polynucleotide molecules, including DNA, that hybridize to, and are therefore the complements of, the nucleotide sequences of the disclosed GTSs. Such hybridization conditions may be highly stringent or less highly stringent, as described above. In instances wherein the nucleic acid molecules are deoxyoligonucleotides (“DNA oligos”), highly stringent conditions may refer to, for example, washing in 6× SSC/0.05% sodium pyrophosphate at 37° C. (for oligos having 14-base DNA oligos), 48° C. (for 17-base DNA oligos), 55° C. (for 20-base DNA oligos), and 60° C. (for 23-base oligos). Similar conditions are contemplated for RNA oligos corresponding to a portion of the disclosed GTS sequences.

[0030] These nucleic acid molecules may encode or act as antisense molecules to polynucleotides comprising at least a portion of the sequences first disclosed in SEQ ID NOS: 1-1,461 that are useful, for example, to regulate the expression of genes comprising a nucleotide sequence of any of SEQ ID NOS: 1-1,461, and can also be used, for example, as antisense primers in amplification reactions of gene sequences. With respect to gene regulation, such techniques can be used to regulate, for example, developmental processes by inhibiting, enhancing, hindering, or otherwise modulating the expression of genes in target cells, or particularly in embryonic stem cells. Further, such sequences may be used as part of ribozyme and/or triple helix sequences that can be used to regulate gene expression. Optionally, genes or polynucleotides encoding the GTSs can be conditionally expressed.

[0031] Still further, such molecules may be used as components of diagnostic methods whereby, for example, the presence of a particular allele, of a gene that contains any of the sequences of SEQ ID NOS: 1-1,461 may be detected. Of particular interest is the use of the disclosed GTSs to conduct analysis of single nucleotide polymorphisms (SNPs) in the human genome, or as general or individual-specific forensic markers.

[0032] In addition to the nucleotide sequences described above, full length cDNA or gene sequences that contain any of SEQ ID NOS: 1-1,461 present in the same species and/or homologs of any of those genes present in other species can be identified and isolated by using molecular biological techniques known in the art.

[0033] In order to clone the full length cDNA sequence from any species encoding the cDNA corresponding to the entire messenger RNA or to clone variant or heterologous forms of the molecule, labeled DNA probes made from nucleic acid fragments corresponding to any of the partial cDNA disclosed herein may be used to screen a cDNA library. For example, oligonucleotides corresponding to either the 5′ or 3′ terminus of the cDNA sequence may be used to obtain longer nucleotide sequences. Briefly, the library may be plated out to yield a maximum of about 30,000 pfu for each 150 mm plate. Approximately 40 plates may be screened. The plates are incubated at 37° C. until the plaques reach a diameter of 0.25 mm or are just beginning to make contact with one another (3-8 hours). Nylon filters are placed onto the soft top agarose and after 60 seconds, the filters are peeled off and floated on a DNA denaturing solution consisting of 0.4N sodium hydroxide. The filters are then immersed in neutralizing solution consisting of 1 M Tris HCl, pH 7.5, before being allowed to air dry. The filters are prehybridized in casein hybridization buffer containing 10% dextran sulfate, 0.5 M NaCl, 50 mM Tris HCl, pH 7.5, 0.1% sodium pyrophosphate, 1% casein, 1% SDS, and denatured salmon sperm DNA at 0.5 mg/ml for 6 hours at 60° C. The radiolabelled probe is then denatured by heating to 95° C. for 2 minutes and then added to the prehybridization solution containing the filters. The filters are hybridized at 60° C. (alternatively, as in all hybridizations described herein, approximately 42, 44, 46, 48, 50, 52, 54, 56, 58, 62, 64, 66, 68, 70, or about 72 degrees or more can be used) for about 16 hours. The filters are then washed in approximately 1× wash mix (10× wash mix contains 3M NaCl, 0.6M Tris base, and 0.02M EDTA, alternatively, as with all washes described herein, 2×, 3×, 4×, 5×, 6× wash mix, or more, can be used) twice for 5 minutes each at room temperature, then in 1× wash mix containing 1% SDS at 60° C. (alternatively, as in all washes described herein, approximately 42, 44, 46, 48, 50, 52, 54, 56, 58, 62, 64, 66, 68, 70, or about 72 degrees or more can be used) for about 30 min, and finally in 0.3× wash mix (alternatively, as in all final washes described herein, approximately, 0.2×, 0.4×, 0.6×, 0.8×, 1×, or any concentration between about 2× and about 6× can be used in conjunction with a suitable wash temperature) containing 0.1% SDS at 60° C. (alternatively, approximately 42, 44, 46, 48, 50, 52, 54, 56, 58, 62, 64, 66, 68, 70, or about 72 degrees or more can be used) for about 30 min. The filters are then air dried and exposed to x-ray film for autoradiography. After developing, the film is aligned with the filters to select a positive plaque. If a single, isolated positive plaque cannot be obtained, the agar plug containing the plaques will be removed and placed in lambda dilution buffer containing 0.1M NaCl, 0.01M magnesium sulfate, 0.035M Tris HCl, pH 7.5, 0.01% gelatin. The phage may then be replated and rescreened to obtain single, well isolated positive plaques. Positive plaques may be isolated and the cDNA clones sequenced using primers based on the known cDNA sequence. This step may be repeated until a full length cDNA is obtained.

[0034] It may be necessary to screen multiple cDNA libraries from different sources/tissues to obtain a full length cDNA. In the event that it is difficult to identify cDNA clones encoding the complete 5′ terminal coding region, an often encountered situation in cDNA cloning, the RACE (Rapid Amplification of cDNA Ends) technique may be used. RACE is a proven PCR-based strategy for amplifying the 5′ end of incomplete cDNAs. 5′-RACE-Ready cDNA synthesized from human fetal liver containing a unique anchor sequence is commercially available (Clontech). To obtain the 5′ end of the cDNA, PCR is carried out, for example, on 5′-RACE-Ready cDNA using the provided anchor primer and the 3′ primer. A secondary PCR reaction is then carried out using the anchored primer and a nested 3′ primer according to the manufacturer's instructions.

[0035] Once obtained, the full length cDNA sequence may be translated into amino acid sequence and examined for certain landmarks found in the amino acid sequences encoded by SEQ ID NOS: 1-1,461, or any structural similarities to these disclosed sequences.

[0036] The identification of homologs, heterologs, or paralogs of SEQ ID NOS: 1-1,461 in other, preferably related, species can be useful for developing additional animal model systems that are closely related to humans for purposes of drug discovery. Genes at other genetic loci within the genome that encode proteins which have extensive homology to one or more domains of the gene products encoded by SEQ ID NOS: 1-1,461 can also be identified via similar techniques. In the case of cDNA libraries, such screening techniques can identify clones derived from alternatively spliced transcripts in the same or different species.

[0037] Screening can be done using filter hybridization with duplicate filters. The labeled probe can contain at least 15-30 base pairs of the nucleotide sequence presented in SEQ ID NOS: 1-1,461. The hybridization washing conditions used should be of a lower stringency when the cDNA library is derived from an organism different from, or heterologous to, the type of organism from which the labeled sequence was derived. With respect to the cloning of a mammalian homolog, heterolog, ortholog, or paralog, using probes derived from any of the sequences of SEQ ID NOS: 1-1,461, for example, hybridization can, for example, be performed at 65° C. overnight in Church's buffer (7% SDS, 250 mM NaHPO₄, 2 mM EDTA, 1% BSA). Washes can be done with 2× SSC, 0.1% SDS at 65° C. and then at 0.1×SSC, 0.1% SDS at 65° C.

[0038] Low stringency conditions are well known to those of skill in the art, and will vary predictably depending on the specific organisms from which the library and the labeled sequences are derived. For guidance regarding such conditions see, for example, Sambrook et al., 1989, Molecular Cloning, A Laboratory Manual, Cold Springs Harbor Press, N.Y.; and Ausubel et al., 1989, Current Protocols in Molecular Biology, Green Publishing Associates and Wiley Interscience, N.Y.

[0039] Alternatively, the labeled nucleotide probe of a sequence of any of SEQ ID NOS: 1-1,461 may be used to screen a genomic library derived from the organism of interest, again, using appropriately stringent conditions. The identification and characterization of human genomic clones is helpful for designing diagnostic tests and clinical protocols for treating disorders in human patients that are known or suspected to be linked to disease or other development or cell differentiation disorders and abnormalities. For example, sequences derived from regions adjacent to the intron/exon boundaries of the human gene can be used to design primers for use in amplification assays to detect mutations within the exons, introns, splice sites (e.g., splice acceptor and/or donor sites), etc., that can be used in diagnostics.

[0040] Further, gene homologs can also be isolated from nucleic acid of the organism of interest by performing PCR using two oligonucleotide primers derived from SEQ ID NOS: 1-1,461, or two degenerate oligonucleotide primer pools designed on the basis of amino acid sequences within the gene products encoded by SEQ ID NOS: 1-1,461. The template for the reaction may be cDNA obtained by reverse transcription of mRNA prepared from, for example, human or non-human cell lines, cell types, or tissues, like, for example, ES cells from the organism of interest.

[0041] The PCR product may be subcloned or sequenced directly or subcloned and sequenced to ensure that the amplified sequences represent the sequences of the gene corresponding to the sequence of SEQ ID NOS: 1-1,461 of interest. The PCR fragment may then be used to isolate a full length cDNA clone by a variety of methods. For example, the amplified fragment may be labeled and used to screen a cDNA library, such as a bacteriophage cDNA library. Alternatively, the labeled fragment may be used to isolate genomic clones via the screening of a genomic library.

[0042] PCR technology may also be utilized to isolate full length cDNA sequences. For example, RNA may be isolated, following standard procedures, from an appropriate cellular source (i.e., one known, or suspected, to express the gene corresponding to the sequence of SEQ ID NOS: 1-1,461 of interest, such as, for example, ES cells). A reverse transcription reaction may be performed on the RNA using an oligonucleotide primer specific for the most 5′ end of the amplified fragment for the priming of first strand synthesis. The resulting RNA/DNA hybrid may then be “tailed” with guanines, for example, using a standard terminal transferase reaction, the hybrid may be digested with RNase H, and second strand synthesis may then be primed with a poly-C primer. Thus, cDNA sequences upstream from the amplified fragment may easily be isolated. For a review of cloning strategies which may be used, see e.g., Sambrook et al., 1989, supra. Alternatively, cDNA or genomic libraries can be screened using 5′ PCR primers that hybridize to vector sequences and 3′ PCR primers specific to the gene of interest. Typically, such primers comprise oligonucleotide “priming” sequences first disclosed in, or otherwise unique to, one of the GTSs of SEQ ID NOS: 1-1,461.

[0043] The sequence of a gene corresponding to any of the sequences of SEQ ID NOS: 1-1,461 can also be used to isolate mutant alleles of that gene. Such mutant alleles may be isolated from individuals either known or suspected to have a genotype which contributes to the disease of interest or other symptoms of developmental and cell differentiation and/or proliferation disorders and abnormalities. Mutant alleles and mutant allele products may then be utilized in the therapeutic and diagnostic programs described below. Additionally, such sequences of any of the genes corresponding to SEQ ID NOS: 1-1,461 can be used to detect gene regulatory (e.g., promoter or promoter/enchanter) defects which can affect development or cell differentiation.

[0044] A cDNA of a mutant gene corresponding to any of the sequences of SEQ ID NOS: 1-1,461 can be isolated as discussed above, or, for example, by using PCR. In this case, the first cDNA strand may be synthesized by hybridizing an oligo-dT oligonucleotide to mRNA isolated from cells derived from an individual suspected of carrying a mutant gene corresponding to any of the sequences of SEQ ID NOS: 1-1,461 by extending the new strand with reverse transcriptase. The second strand of the cDNA is then synthesized using an oligonucleotide that hybridizes specifically to the 5′ region of the normal gene. The amplified product can be directly sequenced or cloned into a suitable vector and subsequently subjected to DNA sequence analysis. By comparing the DNA sequence of the mutant allele to that of the normal allele, the mutation(s) responsible for the loss or alteration of function of the mutant gene product can be ascertained.

[0045] Alternatively, a genomic library can be constructed using DNA obtained from one or more individuals suspected of carrying, or known to carry, a mutant allele corresponding to any of SEQ ID NOS: 1-1,461. Corresponding mutant cDNA libraries can be also constructed using RNA from cell types known, or suspected, to express such mutant alleles. The corresponding normal gene, or any suitable fragment thereof, may then be labeled and used as a probe to identify the corresponding mutant allele in such libraries. Clones containing the mutant gene sequences may then be identified and analyzed by DNA sequence analysis. Additionally, a protein expression library can be constructed utilizing cDNA synthesized from, for example, RNA isolated from a cell type known, or suspected, to express a mutant allele corresponding to any of the sequences of SEQ ID NOS: 1-1,461 from an individual suspected of, carrying or known to carry, such a mutant allele. In this manner, gene products made by the putatively mutant cell type may be expressed and screened using standard antibody screening techniques in conjunction with antibodies raised against the corresponding normal gene product or a portion thereof, as described below in Section 5.4 (For screening techniques, see, for example, Harlow, E. and Lane, eds., 1988, “Antibodies: A Laboratory Manual”, Cold Spring Harbor Press, Cold Spring Harbor.) Additionally, screening can be accomplished by screening with labeled fusion proteins. In cases where a mutation results in an expressed gene product with altered function (e.g., as a result of a missense or a frame shift mutation), a polyclonal set of antibodies to the wild-type gene product are likely to cross-react with the mutant gene product. Library clones detected via their reaction with such labeled antibodies can be purified and subjected to sequence analysis according to methods well known to those of skill in the art.

[0046] The invention also encompasses nucleotide sequences that encode mutant isoforms of any of the amino acid sequences encoded by the GTSs of SEQ ID NOS: 1-1,461, peptide fragments thereof, truncated versions thereof, and fusion proteins including any of the above. Examples of such fusion proteins can include, but not limited to, an epitope tag which aids in purification or detection of the resulting fusion protein; or an enzyme, fluorescent protein, luminescent protein which can be used as a marker.

[0047] The present invention additionally encompasses (a) RNA or DNA vectors that contain any portion of SEQ ID NOS: 1-1,461 and/or their complements as well as any of the peptides or proteins encoded thereby; (b) DNA vectors that contain a cDNA that substantially spans the entire open reading frame corresponding to any of the sequences of SEQ ID NOS: 1-1,461 and/or their complements; (c) DNA expression vectors that contain any of the foregoing sequences, or a portion thereof, operatively associated with a (d) genetically engineered host cells that contain a cDNA that spans the entire open reading frame, or any portion thereof, corresponding to any of the sequences of SEQ ID NOS: 1-1,461 operatively associated with a regulatory element, generally recombinantly positioned either in vivo (such as in gene activation) or in vitro, that directs the expression of the GTS coding sequences in the host cell. As used herein, regulatory elements include but are not limited to inducible and non-inducible promoters, enhancers, operators and other elements known to those skilled in the art that drive and regulate expression. Such regulatory elements include but are not limited to the baculovirus promoter, cytomegalovirus hCMV immediate early gene promoter, the early or late promoters of SV40 adenovirus, the lac system, the trp system, the TAC system, the TRC system, the major operator and promoter regions of phage A, the control regions of fd coat protein, acid phosphatase promoters, phosphoglycerate kinase (PGK) and especially 3-phosphoglycerate kinase promoters, and yeast alpha mating factors.

[0048] Because the described GTSs represent cellular exon sequence that has been recognized and spliced by the cellular splicing machinery, each GTS further identifies at least one exon and/or exon splice junctions that is useful, and in many cases necessary, for chromosome mapping and the analysis and practical application of genomic DNA sequence data.

### 5.2.Proteins and Polypeptides Encoded by Polynucleotides Expressed in Mouse ES Cells

[0049] Peptides and proteins encoded by the open reading frame of mRNAs corresponding to SEQ ID NOS: 1-1,461, polypeptides and peptide fragments, mutated, truncated or deleted forms of those peptides and proteins, fusion proteins containing any of those peptides and proteins can be prepared for a variety of uses, including but not limited to, the generation of antibodies, as reagents in diagnostic assays, the identification of other cellular gene products involved in the regulation of development and cellular differentiation of various cell types, like, for example, ES cells, as reagents in assays for screening for compounds that can be used in the treatment of disorders affecting development and cell differentiation, and as pharmaceutical reagents useful in the treatment of disorders affecting development and cell differentiation.

[0050] The invention also encompasses proteins, peptides, and polypeptides that are functionally equivalent to those encoded by SEQ ID NOS: 1-1,461. Such functionally equivalent products include, but are not limited to, additions or substitutions of amino acid residues within the amino acid sequence encoded by the nucleotide sequences described above, but which result in a silent change, thus producing a functionally equivalent gene product. Amino acid substitutions can be made on the basis of similarity in polarity, charge, solubility, hydrophobicity, hydrophilicity, and/or the amphipathic nature of the residues involved. For example, nonpolar (hydrophobic) amino acids include alanine, leucine, isoleucine, valine, proline, phenylalanine, tryptophan, and methionine; polar neutral amino acids include glycine, serine, threonine, cysteine, tyrosine, asparagine, and glutamine; positively charged (basic) amino acids include arginine, lysine, and histidine; and negatively charged (acidic) amino acids include aspartic acid and glutamic acid.

[0051] While random mutations can be introduced into DNA encoding peptides and proteins of the current invention (using random mutagenesis techniques well known to those skilled in the art), and the resulting mutant peptides and proteins tested for activity, site-directed mutations of the coding sequence can be engineered (using standard site-directed mutagenesis techniques) to generate mutant peptides and proteins of the current invention having increased functionality.

[0052] For example, the novel amino acid sequence of peptides and proteins at least partially encoded by the GTSs of the current invention can be aligned with homologs from different species. Mutant peptides and proteins can be engineered so that regions of interspecies identity are maintained, whereas the variable residues are altered, e.g., by deletion or insertion of an amino acid residue(s) or by substitution of one or more different amino acid residues. Conservative alterations at the variable positions can be engineered in order to produce a mutant form of a peptide or protein of the current invention that retains function. Non-conservative changes can be engineered at these variable positions to alter function. Alternatively, where alteration of function is desired, deletion or non-conservative alterations of the conserved regions can be engineered. One of skill in the art may easily test such mutant or deleted form of a peptide or protein of the current invention for these alterations in function using the teachings presented herein.

[0053] Other mutations to the coding sequences described above can be made to generate peptides and proteins that are better suited for expression, scale up, etc. in the host cells chosen. For example, the triplet code for each amino acid can be modified to conform more closely to the preferential codon usage of the host cell's translational machinery, or, for example, to yield a messenger RNA molecule with a longer half-life. Those skilled in the art would readily know what modifications of the nucleotide sequence would be desirable to conform the nucleotide sequence to preferential codon usage or to make the messenger RNA more stable. Such information would be obtainable, for example, through use of computer programs, through review of available research data on codon usage and messenger RNA stability, and through other means known to those of skill in the art.

[0054] Peptides corresponding to one or more domains (or a portion of a domain) of one of the proteins described above, truncated or deleted proteins, as well as fusion proteins in which the full length protein described above, a subunit peptide or truncated version is fused to an unrelated protein are also within the scope of the invention and can be designed by those of skill in the art on the basis of experimental or functional considerations. Such fusion proteins include but are not limited to fusions to an epitope tag; or fusions to an enzyme, fluorescent protein, or luminescent protein which provide a marker function.

[0055] While the peptides and proteins of the current invention can be chemically synthesized (e.g., see Creighton, 1983, Proteins: Structures and Molecular Principles, W.H. Freeman & Co., N.Y.), large polypeptides derived from any of the polynucleotides described above may advantageously be produced by recombinant DNA technology using techniques well known in the art for expressing genes and/or coding sequences. These methods include, for example, in vitro recombinant DNA techniques, synthetic techniques, and in vivo genetic recombination. See, for example, the techniques described in Sambrook et al., 1989, supra, and Ausubel et al., 1989, supra. Alternatively, RNA capable of encoding any of the nucleotide sequences described above may be chemically synthesized using, for example, synthesizers. See, for example, the techniques described in “Oligonucleotide Synthesis”, 1984, Gait, M. J. ed., IRL Press, Oxford, which is incorporated by reference herein in its entirety.

[0056] A variety of host-expression vector systems may be utilized to express the nucleotide sequences of the invention. Where the peptide or protein to be synthesized is a soluble derivative, the peptide or polypeptide can be recovered from the culture, i.e., from the host cell in cases where the peptide or polypeptide is not secreted, and from the culture media in cases where the peptide or polypeptide is secreted by the cells. However, such engineered host cells themselves may be used in situations where it is important not only to retain the structural and functional characteristics of the expressed peptide or protein, but to assess biological activity, e.g., in drug screening assays.

[0057] The expression systems that may be used for purposes of the invention include but are not limited to microorganisms such as bacteria (e.g., E. coli, B. subtilis) transformed with recombinant bacteriophage DNA, plasmid DNA or cosmid DNA expression vectors containing a nucleotide sequence of the current invention; yeast (e.g., Saccharomyces, Pichia, etc.) transformed with recombinant yeast expression vectors containing a nucleotide sequence of the current invention; insect cell systems infected with recombinant virus expression vectors (e.g., baculovirus) containing a nucleotide sequence of the current invention; plant cell systems infected with recombinant virus expression vectors (e.g., cauliflower mosaic virus, CaMV; tobacco mosaic virus, TMV) or transformed with recombinant plasmid expression vectors (e.g., Ti plasmid) containing a nucleotide sequence of the current invention; or mammalian cell systems (e.g., COS, CHO, BHK, 293, 3T3, U937) harboring recombinant expression constructs containing promoters derived from the genome of mammalian cells (e.g., metallothionein promoter) or from mammalian viruses (e.g., the adenovirus late promoter; the vaccinia virus 7.5K promoter).

[0058] In bacterial systems, a number of expression vectors may be advantageously selected depending upon the use intended for the gene product being expressed. For example, when large quantities of such a protein are to be produced for the generation of pharmaceutical compositions of a protein or for raising antibodies to the protein to be expressed, for example, vectors which direct the expression of high levels of fusion protein products that are readily purified may be desirable. Such vectors include, but are not limited, to the E. coli expression vector pUR278 (Ruther et al., 1983, EMBO J. 2:1791), in which the coding sequence of the polynucleotide to be expressed may be ligated individually into the vector in frame with the lacZ coding region so that a fusion protein is produced; pIN vectors (Inouye & Inouye, 1985, Nucleic Acids Res. 13:3101-3109; Van Heeke & Schuster, 1989, J. Biol. Chem. 264:5503-5509); and the like. pGEX vectors may also be used to express foreign polypeptides as fusion proteins with glutathione S-transferase (GST). If the inserted sequence encodes a relatively small polypeptide (less than 25 kD), such fusion proteins are generally soluble and can easily be purified from lysed cells by adsorption to glutathione-agarose beads followed by elution in the presence of free glutathione. The pGEX vectors are designed to include thrombin or factor Xa protease cleavage sites so that the cloned target gene product can be released from the GST moiety. Alternatively, if the resulting fusion protein is insoluble and forms inclusion bodies in the host cell, the inclusion bodies may be purified and the recombinant protein solubilized using techniques well known to one of skill in the art.

[0059] In an insect system, Autographa californica nuclear polyhidrosis virus (AcNPV) may be used as a vector to express foreign genes. (e.g., see Smith et al., 1983, J. Virol. 46: 584; Smith, U.S. Pat. No. 4,215,051). In one embodiment of the current invention, Sf9 insect cells are infected with a baculovirus vector expressing a peptide or protein of the current invention.

[0060] In mammalian host cells, a number of viral-based expression systems may be utilized. Specific embodiments described more fully below express tagged cDNA sequences of the current invention using a CMV promoter to transiently express recombinant protein in U937 cells or in Cos-7 cells. Alternatively, retroviral vector systems well known in the art may be used to insert the recombinant expression construct into host cells.

[0061] In yeast, a number of vectors containing constitutive or inducible promoters may be used. For a review, see Current Protocols in Molecular Biology, Vol. 2, 1988, Ed. Ausubel et al., Greene Publish. Assoc. & Wiley Interscience, Ch. 13; Grant et al., 1987, Expression and Secretion Vectors for Yeast, in Methods in Enzymology, Eds. Wu & Grossman, 1987, Acad. Press, N.Y., Vol. 153, pp. 516-544; Glover, 1986, DNA Cloning, Vol. II, IRL Press, Wash., D.C., Ch. 3; and Bitter, 1987, Heterologous Gene Expression in Yeast, Methods in Enzymology, Eds. Berger & Kimmel, Acad. Press, N.Y., Vol. 152, pp. 673-684; and The Molecular Biology of the Yeast Saccharomyces, 1982, Eds. Strathern et al., Cold Spring Harbor Press, Vols. I and II.

[0062] In cases where plant expression vectors are used, the expression of the coding sequence may be driven by any of a number of promoters. For example, viral promoters such as the 35S RNA and 19S RNA promoters of CaMV (Brisson et al., 1984, Nature, 310:511-514), or the coat protein promoter of TMV (Takamatsu et al., 1987, EMBO J. 6:307-311) may be used; alternatively, plant promoters such as the small subunit of RUBISCO (Coruzzi et al., 1984, EMBO J. 3:1671-1680; Broglie et al., 1984, Science 224:838-843); or heat shock promoters, e.g., soybean hsp17.5-E or hsp17.3-B (Gurley et al., 1986, Mol. Cell. Biol. 6:559-565) may be used. These constructs can be introduced into plant cells using Ti plasmids, Ri plasmids, plant virus vectors, direct DNA transformation, microinjection, electroporation, etc. For reviews of such techniques see, for example, Weissbach & Weissbach, 1988, Methods for Plant Molecular Biology, Academic Press, NY, Section VIII, pp. 421-463; and Grierson & Corey, 1988, Plant Molecular Biology, 2d Ed., Blackie, London, Ch. 7-9.

[0063] In cases where an adenovirus is used as an expression vector, the nucleotide sequence of interest may be ligated to an adenovirus transcription/translation control complex, e.g., the late promoter and tripartite leader sequence. This chimeric gene may then be inserted in the adenovirus genome by in vitro or in vivo recombination. Insertion in a non-essential region of the viral genome (e.g., region E1 or E3) will result in a recombinant virus that is viable and capable of expressing the gene product of interest in infected hosts. (e.g., See Logan & Shenk, 1984, Proc. Natl. Acad. Sci. USA 81:3655-3659). Specific initiation signals may also be required for efficient translation of inserted nucleotide sequences of interest. These signals include the ATG initiation codon and adjacent sequences. In cases where an entire gene or cDNA, including its own initiation codon and adjacent sequences, is inserted into the appropriate expression vector, no additional translational control signals may be needed. However, in cases where only a portion of a coding sequence of interest is inserted, exogenous translational control signals, including, perhaps, the ATG initiation codon, must be provided. Furthermore, the initiation codon must be in phase with the reading frame of the desired coding sequence to ensure translation of the entire insert. These exogenous translational control signals and initiation codons can be of a variety of origins, both natural and synthetic. The efficiency of expression may be enhanced by the inclusion of appropriate transcription enchanter elements, transcription terminators, etc. (See Bittner et al., 1987, Methods in Enzymol. 153:516-544).

[0064] In addition, a host cell strain may be chosen which modulates the expression of the inserted sequences, or modifies and processes the gene product in the specific fashion desired. Such modifications (e.g., glycosylation) and processing (e.g., cleavage) of protein products may be important for the function of the protein. Different host cells have characteristic and specific mechanisms for the post-translational processing and modification of proteins and gene products. Appropriate cell lines or host systems can be chosen to ensure the correct modification and processing of the foreign protein expressed. To this end, eukaryotic host cells which possess the cellular machinery for proper processing of the primary transcript may be used. Such mammalian host cells include but are not limited to CHO, VERO, BHK, HeLa, COS, MDCK, 293, 3T3, WI38, and U937 cells.

[0065] For long-term, high-yield production of recombinant proteins, stable expression is preferred. For example, cell lines which stably express the sequences of interest described above may be engineered. Rather than using expression vectors which contain viral origins of replication, host cells can be transformed with DNA controlled by appropriate expression control elements (e.g., promoter, enhancer sequences, transcription terminators, polyadenylation sites, etc.), and a selectable marker. Following the introduction of the foreign DNA, engineered cells may be allowed to grow for 1-2 days in an enriched media, and then are switched to a selective media. The selectable marker in the recombinant plasmid confers resistance to the selection and allows cells to stably integrate the plasmid into their chromosomes and grow to form foci which in turn can be cloned and expanded into cell lines. This method may advantageously be used to engineer cell lines which express the gene product of interest. Such engineered cell lines may be particularly useful in screening and evaluation of compounds that affect the endogenous activity of the gene product of interest.

[0066] A number of selection systems may be used, including but not limited to the herpes simplex virus thymidine kinase (Wigler et al., 1977, Cell 11:223), hypoxanthine-guanine phosphoribosyltransferase (Szybalska & Szybalski, 1962, Proc. Natl. Acad. Sci. USA 48:2026), and adenine phosphoribosyltransferase (Lowy et al., 1980, Cell 22:817) genes can be employed in tk⁻, hgprt⁻ or aprt⁻ cells, respectively. Also, antimetabolite resistance can be used as the basis of selection for the following genes: dhfr, which confers resistance to methotrexate (Wigler et al., 1980, Natl. Acad. Sci. USA 77:3567; O'Hare et al., 1981, Proc. Natl. Acad. Sci. USA 78:1527); gpt, which confers resistance to mycophenolic acid (Mulligan & Berg, 1981, Proc. Natl. Acad. Sci. USA 78:2072); neo, which confers resistance to the aminoglycoside G-418 (Colberre-Garapin et al., 1981, J. Mol. Biol. 150:1); and hygro, which confers resistance to hygromycin (Santerre et al., 1984, Gene 30:147).

[0067] The novel gene products/peptide sequences encoded by the described novel GTSs are also useful as epitope tags for the antigenic or other tagging of proteins and polypeptides that have been engineered to incorporate or comprise at least a portion of an GTS peptide sequence.

[0068] The gene products of interest can also be expressed in transgenic animals. Animals of any species, including, but not limited to, mice, rats, rabbits, guinea pigs, pigs, micro-pigs, goats, and non-human primates, e.g., baboons, monkeys, and chimpanzees may be used to generate transgenic animals carrying the polynucleotide of interest of the current invention.

[0069] Any technique known in the art may be used to introduce the transgene of interest into animals to produce the founder lines of transgenic animals. Such techniques include, but are not limited to pronuclear microinjection (Hoppe, P. C. and Wagner, T. E., 1989, U.S. Pat. No. 4,873,191); retrovirus mediated gene transfer into germ lines (Van der Putten et al., 1985, Proc. Natl. Acad. Sci., USA 82:6148-6152); gene targeting in embryonic stem cells (Thompson et al., 1989, Cell 56:313-321); electroporation of embryos (Lo, 1983, Mol Cell. Biol. 3:1803-1814); sperm-mediated gene transfer (Lavitrano et al., 1989, Cell 57:717-723); positive-negative selection as described in U.S. Pat. No. 5,464,764 herein incorporated by reference. For a review of such techniques, see Gordon, 1989, Transgenic Animals, Intl. Rev. Cytol. 115:171-229, which is incorporated by reference herein in its entirety.

[0070] The present invention provides for transgenic animals that carry the transgene of interest in all their cells, as well as animals which carry the transgene in some, but not all their cells, i.e., mosaic animals. The transgene may be integrated as a single transgene or in concatamers, e.g., head-to-head tandems or head-to-tail tandems. The transgene may also be selectively introduced into and activated in a particular cell type by following, for example, the teaching of Lasko et al. (Lasko, M. et al., 1992, Proc. Natl. Acad. Sci. USA 89:6232-6236). The regulatory sequences required for such a cell-type specific activation will depend upon the particular cell type of interest, and will be apparent to those of skill in the art. When it is desired that the transgene of interest be integrated into the chromosomal site of the endogenous copy of that same gene, gene targeting is preferred. Briefly, when such a technique is to be utilized, vectors containing some nucleotide sequences homologous to the endogenous gene of interest are designed for the purpose of integrating, via homologous recombination with chromosomal sequences, into and disrupting the function of the nucleotide sequence of the endogenous gene of interest. In this way, the expression of the endogenous gene may also be eliminated by inserting non-functional sequences into the endogenous gene. The transgene may also be selectively introduced into a particular cell type, thus inactivating the endogenous gene of interest in only that cell type, by following, for example, the teaching of Gu et al. (Gu et al., 1994, Science 265: 103-106). The regulatory sequences required for such a cell-type specific inactivation will depend upon the particular cell type of interest, and will be apparent to those of skill in the art.

[0071] Once transgenic animals have been generated, the expression of the recombinant gene of interest may be assayed utilizing standard techniques. Initial screening may be accomplished by Southern blot analysis or PCR techniques to analyze animal tissues to assay whether integration of the transgene has taken place. The level of mRNA expression of the transgene in the tissues of the transgenic animals may also be assessed using techniques which include but are not limited to Northern blot analysis of cell type samples obtained from the animal, in situ hybridization analysis, and RT-PCR. Samples of gene-expressing tissue, can also be evaluated immunocytochemically using antibodies specific for the transgene product, as described below.

### 5.3. Cells that Contain a Disrupted Allele of a Gene Encoding a Polynucleotide of the Current Invention

[0072] Another aspect of the current invention are cells which contain a gene that encodes a polynucleotide of the current invention and that has been disrupted. Those of skill in the art would know how to disrupt a gene in a cell using techniques known in the art. Also, techniques useful to disrupt a gene in a cell and especially an ES cell, that may already be disrupted, as disclosed in copending U.S. patent application Ser. Nos. 08/726,867; 08/728,963; 08/907,598; and 08/942,806, all of which are hereby incorporated herein by reference in their entirety, are within the scope of the current invention to disrupt a gene that encodes a polynucleotide of the current invention.

### 5.3.1 Identification of Cells that Express Genes Encoding Polynucleotides of the Current Invention

[0073] Host cells that contain coding sequence and/or express a biologically active gene product, or fragment thereof, encoded by gene corresponding to an GTS of the present invention may be identified by at least four general approaches; (a) DNA-DNA or DNA-RNA hybridization; (b) the presence or absence of “marker” gene functions; (c) assessing the level of transcription as measured by the expression of mRNA transcripts in the host cell; and (d) detection of the gene product as measured by immunoassay, enzymatic assay, chemical assay, or by its biological activity. Prior to screening for gene expression, the host cells can first be treated in an effort to increase the level of expression of genes encoding polynucleotides of the current invention, especially in cell lines that produce low amounts of the mRNAs and/or peptides and proteins of the current invention.

[0074] In the first approach, the presence of the coding sequence for peptides and proteins of the current invention inserted in the expression vector can be detected by DNA-DNA or DNA-RNA hybridization using probes comprising nucleotide sequences that are homologous to the coding sequence for peptides and proteins of the current invention, respectively, or portions or derivatives thereof.

[0075] In the second approach, the recombinant expression vector/host system can be identified and selected based upon the presence or absence of certain “marker” gene functions (e.g., thymidine kinase activity, resistance to antibiotics, resistance to methotrexate, transformation phenotype, occlusion body formation in baculovirus, etc.). For example, if the coding sequence for the peptide or protein of the current invention is inserted within a marker gene sequence of the vector, recombinants containing the coding sequence for the peptide or protein of the current invention can be identified by the absence of marker gene function. Alternatively, a marker gene can be placed in tandem with the sequence for the peptide or protein of the current invention under the control of the same or different promoter used to control the expression of the coding sequence for the peptide or protein of the current invention. Expression of the marker in response to induction or selection indicates expression of the coding sequence for the peptide or protein of the current invention.

[0076] In the third approach, transcriptional activity for the coding region of genes specific for peptides and proteins of the current invention can be assessed by hybridization assays. For example, RNA can be isolated and analyzed by Northern blot using a probe derived from a GTS, or any portion thereof. Alternatively, total nucleic acids of the host cell may be extracted and assayed for hybridization to such probes. Additionally, RT-PCR (using GTS specific oligos/products) may be used to detect low levels of gene expression in a sample, or in RNA isolated from a spectrum of different tissues, or PCR can be used can be used to screen a variety of cDNA libraries derived from different tissues to determine which tissues express a given GTS.

[0077] In the fourth approach, the expression of the peptides and proteins of the current invention can be assessed immunologically, for example by Western blots, immunoassays such as radioimmuno-precipitation, enzyme-linked immunoassays and the like. This can be achieved by using an antibody and a binding partner specific to a peptide or protein of the current invention.

### 5.4. Antibodies to Proteins of the Current Invention

[0078] Antibodies that specifically recognize one or more epitopes of a peptide or protein encoded by the GTSs of the present invention, or epitopes of conserved variants of these peptides or proteins, or any and all peptide fragments thereof are also encompassed by the invention. Such antibodies include but are not limited to polyclonal antibodies, monoclonal antibodies (mAbs), humanized or chimeric antibodies, single chain antibodies, Fab fragments, F(ab′)₂ fragments, fragments produced by a Fab expression library, anti-idiotypic (anti-Id) antibodies, and epitope-binding fragments of any of the above.

[0079] The antibodies of the invention may be used, for example, in the detection of the peptide or protein of interest of the current invention in a biological sample and may, therefore, be utilized as part of a diagnostic or prognostic technique whereby patients may be tested for abnormal amounts of these proteins. Such antibodies may also be utilized in conjunction with, for example, compound screening schemes as described, below in Section 5.6 for the evaluation of the effect of test compounds on expression and/or activity of the gene products of interest of the current invention. Additionally, such antibodies can be used in conjunction with the gene therapy and gene delivery techniques described below to, for example, evaluate the normal and/or engineered peptide- or protein-expressing cells prior to their introduction into the patient. Such antibodies may additionally be used in a method for inhibiting the abnormal activity of a peptide or protein of interest of the current invention. Thus, such antibodies may, for example, be utilized as part of treatment methods for development and cell differentiation disorders.

[0080] For the production of antibodies, various host animals may be immunized by injection with the peptide or protein of interest, a subunit peptide of such protein, a truncated polypeptide, functional equivalents of the peptide or protein, mutants of the peptide or protein, or denatured forms of the above. Such host animals may include but are not limited to rabbits, mice, and rats, to name but a few. Various adjuvants may be used to increase the immunological response, depending on the host species, including but not limited to Freund's adjuvant (complete and incomplete), mineral salts such as aluminum hydroxide or aluminum phosphate, surface active substances such as lysolecithin, pluronic polyols, polyanions, peptides, oil emulsions, and potentially useful human adjuvants such as BCG (bacille Calmette-Guerin) and Corynebacterium parvum. Alternatively, the immune response could be enhanced by combination and or coupling with molecules such as keyhole limpet hemocyanin, tetanus toxoid, diptheria toxoid, ovalbumin, cholera toxin or fragments thereof. Polyclonal antibodies are heterogeneous populations of antibody molecules derived from the sera of the immunized animals.

[0081] Monoclonal antibodies, which are homogeneous populations of antibodies to a particular antigen, may be obtained by any technique which provides for the production of antibody molecules by continuous cell lines in culture. These include, but are not limited to, the hybridoma technique of Kohler and Milstein, (1975, Nature 256:495-497; and U.S. Pat. No. 4,376,110), the human B-cell hybridoma technique (Kosbor et al., 1983, Immunology Today 4:72; Cole et al., 1983, Proc. Natl. Acad. Sci. USA 80:2026-2030), and the EBV-hybridoma technique (Cole et al., 1985, Monoclonal Antibodies And Cancer Therapy, Alan R. Liss, Inc., pp. 77-96). Such antibodies may be of any immunoglobulin class including IgG, IgM, IgE, IgA, IgD and any subclass thereof. The hybridoma producing the mAb of this invention may be cultivated in vitro or in vivo. Production of high titers of mAbs in vivo makes this the presently preferred method of production.

[0082] In addition, techniques developed for the production of “chimeric antibodies” (Morrison et al., 1984, Proc. Natl. Acad. Sci. USA, 81:6851-6855; Neuberger et al., 1984, Nature, 312:604-608; Takeda et al., 1985, Nature, 314:452-454) by splicing the genes from a mouse antibody molecule of appropriate antigen specificity together with genes from a human antibody molecule of appropriate biological activity can be used. A chimeric antibody is a molecule in which different portions are derived from different animal species, such as those having a variable region derived from a porcine mAb and a human immunoglobulin constant region. Such technologies are described in U.S. Pat. Nos. 6,075,181 and 5,877,397 and their respective disclosures which are herein incorporated by reference in their entirety.

[0083] Alternatively, techniques described for the production of single chain antibodies (U.S. Pat. No. 4,946,778; Bird, 1988, Science 242:423-426; Huston et al., 1988, Proc. Natl. Acad. Sci. USA 85:5879-5883; and Ward et al., 1989, Nature 334:544-546) can be adapted to produce single chain antibodies against gene products of interest. Single chain antibodies are formed by linking the heavy and light chain fragments of the Fv region via an amino acid bridge, resulting in a single chain polypeptide.

[0084] Antibody fragments which recognize specific epitopes may be generated by known techniques. For example, such fragments include but are not limited to: the F(ab′)₂ fragments which can be produced by pepsin digestion of the antibody molecule and the Fab fragments which can be generated by reducing the disulfide bridges of the F(ab′)₂ fragments. Alternatively, Fab expression libraries may be constructed (Huse et al., 1989, Science, 246:1275-1281) to allow rapid and easy identification of monoclonal Fab fragments with the desired specificity.

[0085] Antibodies to peptides and proteins of interest that fully or at least partially encoded by GTSs of the current invention or fragments or truncated versions thereof, can, in turn, be utilized to generate anti-idiotypic antibodies that “mimic” an epitope of the peptide or protein of interest, using techniques well known to those skilled in the art. (See, e.g., Greenspan & Bona, 1993, FASEB J 7(5): 437-444; and Nissinoff, 1991, J. Immunol. 147(8): 2429-2438). For example antibodies that bind to a regulatory peptide or protein of interest of the current invention and competitively inhibit the binding of such peptide or protein to any of its binding partners in the cell can be used to generate anti-idiotypes that “mimic” the peptide or protein of interest and, therefore, bind and neutralize the particular binding partner of the peptide or protein of interest. Such neutralizing anti-idiotypes or Fab fragments of such anti-idiotypes can be used in therapeutic regimens to neutralize a particular binding partner of a peptide or protein of interest which play a role in development and cell differentiation processes.

### 5.5. Diagnosis of Disorders Affecting Development and Cell Differentiation

[0086] A variety of methods can be employed for the diagnostic and prognostic evaluation of disorders involving developmental and differentiation processes, and for the identification of subjects having a predisposition to such disorders.

[0087] Such methods may, for example, utilize reagents such as the nucleotide sequences described above, and antibodies to peptides and proteins of the current invention, as described, in Section 5.4. Specifically, such reagents may be used, for example, for: (1) the detection of the presence of gene mutations, or the detection of either over- or under-expression of the respective mRNAs relative to the non-disorder state; (2) the detection of either an over- or an under-abundance of the respective gene product relative to the non-disorder state; and (3) the detection of perturbations or abnormalities in the intra- and inter-cellular processes mediated by the respective peptides or proteins of the current invention.

[0088] The methods described herein may be performed, for example, by utilizing pre-packaged diagnostic kits comprising at least one specific nucleotide sequence of the current invention or antibody reagent described herein, which may be conveniently used, e.g., in clinical settings, to diagnose patients exhibiting developmental or cell differentiation disorder abnormalities.

[0089] For the detection of mutations in any of the genes described above, any nucleated cell can be used as a starting source for genomic nucleic acid. For the detection of gene expression or gene products, any cell type or tissue in which the gene of interest is expressed, such as, for example, ES cells, may be utilized. Specific examples of cells and tissues that can be analyzed using the claimed polynucleotides include, but are not limited to, endothelial cells, epithelial cells, islets, neurons or neural tissue, mesothelial cells, osteocytes, lymphocytes, chondrocytes, hematopoietic cells, immune cells, cells of the major glands or organs (e.g., lung, heart, stomach, pancreas, kidney, skin, etc.), exocrine and/or endocrine cells, embryonic and other stem cells, fibroblasts, and culture adapted and/or transformed versions of the above. Diseases or natural processes that can also be correlated with the expression of mutant, or normal, variants of the disclosed GTSs include, but are not limited to, aging, cancer, autoimmune disease, lupus, scleroderma, Crohn's disease, multiple sclerosis, inflammatory bowel disease, immune disorders, schizophrenia, psychosis, alopecia, glandular disorders, inflammatory disorders, ataxia telangiectasia, diabetes, skin disorders such as acne, eczema, and the like, osteo and rheumatoid arthritis, high blood pressure, atherosclerosis, cardiovascular disease, pulmonary disease, degenerative diseases of the neural or skeletal systems, Alzheimer's disease, Parkinson's disease, osteoporosis, asthma, developmental disorders or abnormalities, genetic birth defects, infertility, epithelial ulcerations, and viral, parasitic, fungal, yeast, or bacterial infection.

[0090] Primary, secondary, or culture adapted variants of cancer cells/tissues can also be analyzed using the claimed polynucleotides. Examples of such cancers include, but are not limited to, Cardiac: sarcoma (angiosarcoma, fibrosarcoma, rhabdomyosarcoma, liposarcoma), myxoma, rhabdomyoma, fibroma, lipoma and teratoma; Lung: bronchogenic carcinoma (squamous cell, undifferentiated small cell, undifferentiated large cell, adenocarcinoma), alveolar (bronchiolar) carcinoma, bronchial adenoma, sarcoma, lymphoma, chondromatous hamartoma, mesothelioma; Gastrointestinal: esophagus (squamous cell carcinoma, adenocarcinoma, leiomyosarcoma, lymphoma), stomach (carcinoma, lymphoma, leiomyosarcoma), pancreas (ductal adenocarcinoma, insulinoma, glucagonoma, gastrinoma, carcinoid tumors, vipoma), small bowel (adenocarcinoma, lymphoma, carcinoid tumors, Karposi's sarcoma, leiomyoma, hemangioma, lipoma, neurofibroma, fibroma), large bowel (adenocarcinoma, tubular adenoma, villous adenoma, hamartoma, leiomyoma); Genitourinary tract: kidney (adenocarcinoma, Wilm's tumor [nephroblastoma], lymphoma, leukemia), bladder and urethra (squamous cell carcinoma, transitional cell carcinoma, adenocarcinoma), prostate (adenocarcinoma, sarcoma), testis (seminoma, teratoma, embryonal carcinoma, teratocarcinoma, choriocarcinoma, sarcoma, interstitial cell carcinoma, fibroma, fibroadenoma, adenomatoid tumors, lipoma); Liver: hepatoma (hepatocellular carcinoma), cholangiocarcinoma, hepatoblastoma, angiosarcoma, hepatocellular adenoma, hemangioma; Bone: osteogenic sarcoma (osteosarcoma), fibrosarcoma, malignant fibrous histiocytoma, chondrosarcoma, Ewing's sarcoma, malignant lymphoma (reticulum cell sarcoma), multiple myeloma, malignant giant cell tumor, chordoma, osteochronfroma (osteocartilaginous exostoses), benign chondroma, chondroblastoma, chondromyxofibroma, osteoid osteoma and giant cell tumors; Nervous system: skull (osteoma, hemangioma, granuloma, xanthoma, osteitis deformans), meninges (meningioma, meningiosarcoma, gliomatosis), brain (astrocytoma, medulloblastoma, glioma, ependymoma, germinoma [pinealoma], glioblastoma multiforme, oligodendroglioma, schwannoma, retinoblastoma, congenital tumors), spinal cord (neurofibroma, meningioma, glioma, sarcoma); Gynecological: uterus (endometrial carcinoma), cervix (cervical carcinoma, pre-tumor cervical dysplasia), ovaries (ovarian carcinoma [serous cystadenocarcinoma, mucinous cystadenocarcinoma, endometrioid tumors, celioblastoma, clear cell carcinoma, unclassified carcinoma], granulosa-thecal cell tumors, Sertoli-Leydig cell tumors, dysgerminoma, malignant teratoma), vulva (squamous cell carcinoma, intraepithelial carcinoma, adenocarcinoma, fibrosarcoma, melanoma), vagina (clear cell carcinoma, squamous cell carcinoma, botryoid sarcoma [embryonal rhabdomyosarcoma], fallopian tubes (carcinoma); Hematologic: blood (myeloid leukemia [acute and chronic], acute lymphoblastic leukemia, chronic lymphocytic leukemia, myeloproliferative diseases, multiple myeloma, myelodysplastic syndrome), Hodgkin's disease, non-Hodgkin's lymphoma [malignant lymphoma]; Skin: malignant melanoma, basal cell carcinoma, squamous cell carcinoma, Karposi's sarcoma, moles, dysplastic nevi, lipoma, angioma, dermatofibroma, keloids, psoriasis; Breast: carcinoma and sarcoma, and Adrenal glands: neuroblastoma.

[0091] Nucleic acid-based detection techniques and peptide detection techniques that can be used to conduct the above analyses are described below.

### 5.5.1. Detection of the Genes of the Current Invention and their Respective Transcripts

[0092] Mutations within the genes of the current invention can be detected by utilizing a number of techniques. Nucleic acid from any nucleated cell can be used as the starting point for such assay techniques, and may be isolated according to standard nucleic acid preparation procedures which are well known to those of skill in the art.

[0093] DNA may be used in hybridization or amplification assays of biological samples to detect abnormalities involving gene structure, including point mutations, insertions, deletions and chromosomal rearrangements. Such assays may include, but are not limited to, Southern analyses, single stranded conformational polymorphism analyses (SSCP), and PCR analyses.

[0094] Such diagnostic methods for the detection of gene-specific mutations can involve for example, contacting and incubating nucleic acids including recombinant DNA molecules, cloned genes or degenerate variants thereof, obtained from a sample, e.g., derived from a patient sample or other appropriate cellular source, with one or more labeled nucleic acid reagents including recombinant DNA molecules, cloned genes or degenerate variants thereof, as described above, under conditions favorable for the specific annealing of these reagents to their complementary sequences within the gene of interest of the current invention. Preferably, the lengths of these nucleic acid reagents are at least 15 to 30 nucleotides. After incubation, all non-annealed nucleic acids are removed from the nucleic acid molecule hybrid. The presence of nucleic acids which have hybridized, if any such molecules exist, is then detected. Using such a detection scheme, the nucleic acid from the cell type or tissue of interest can be immobilized, for example, to a solid support such as a membrane, or a plastic surface such as that on a microtiter plate or polystyrene beads. In this case, after incubation, non-annealed, labeled nucleic acid reagents of the type described above are easily removed. Detection of the remaining, annealed, labeled nucleic acid reagents is accomplished using standard techniques well-known to those in the art. The gene sequences to which the nucleic acid reagents have annealed can be compared to the annealing pattern expected from a normal gene sequence in order to determine whether a gene mutation is present.

[0095] Alternative diagnostic methods for the detection of gene specific nucleic acid molecules, in patient samples or other appropriate cell sources, may involve their amplification, e.g., by PCR (the experimental embodiment set forth in Mullis, K. B., 1987, U.S. Pat. No. 4,683,202), followed by the detection of the amplified molecules using techniques well known to those of skill in the art. The resulting amplified sequences can be compared to those which would be expected if the nucleic acid being amplified contained only normal copies of the respective gene in order to determine whether a gene mutation exists.

[0096] Additionally, well-known genotyping techniques can be performed to identify individuals carrying mutations in any of the genes of the current invention. Such techniques include, for example, the use of restriction fragment length polymorphisms (RFLPs), which involve sequence variations in one of the recognition sites for the specific restriction enzyme used.

[0097] Furthermore, the polynucleotide sequences of the current invention may be mapped to chromosomes and specific regions of chromosomes using well known genetic and/or chromosomal mapping techniques. These techniques include in situ hybridization, linkage analysis against known chromosomal markers, hybridization screening with libraries or flow-sorted chromosomal preparations specific to known chromosomes, and the like. The technique of fluorescent in situ hybridization of chromosome spreads has been described, for example, in Verma et al. (1988) Human Chromosomes: A Manual of Basic Techniques, Pergamon Press, New York. Fluorescent in situ hybridization of chromosomal preparations and other physical chromosome mapping techniques may be correlated with additional genetic map data. Examples of genetic map data can be found, for example, in Genetic Maps: Locus Maps of Complex Genomes, Book 5: Human Maps, O'Brien, editor, Cold Spring Harbor Laboratory Press (1990). Comparisons of physical chromosomal map data may be of particular interest in detecting genetic diseases in carrier states.

[0098] The level of expression of genes can also be assayed by detecting and measuring the transcription of such genes. For example, RNA from a cell type or tissue known, or suspected to express any of the genes of the current invention can be isolated and tested utilizing hybridization or PCR techniques (e.g., northern or RT PCR) such as those described, above. Such analyses may reveal both quantitative and qualitative aspects of the expression pattern of the respective gene, including activation or inactivation of gene expression. In situ hybridization using suitably radioactively or enzymatically labeled forms of the described polynucleotide sequences can also be used to assess expression patterns in vivo.

[0099] Additionally, an oligonucleotide or polynucleotide sequence first disclosed in at least a portion of one or more of the GTS sequences of SEQ ID NOS: 1-1,461 can be used as a hybridization probe in conjunction with a solid support matrix/substrate (resins, beads, membranes, plastics, polymers, metal or metallized substrates, crystalline or polycrystalline substrates, etc.). Of particular note are spatially addressable arrays (i.e., gene chips, microtiter plates, etc.) of oligonucleotides and polynucleotides, or corresponding oligopeptides and polypeptides, wherein at least one of the biopolymers present on the spatially addressable array comprises an oligonucleotide or polynucleotide sequence first disclosed in at least one of the GTS sequences of SEQ ID NOS: 1-1,461, or an amino acid sequence encoded thereby. Methods for attaching biopolymers to, or synthesizing biopolymers on, solid support matrices, and conducting binding studies thereon are disclosed in, inter alia, U.S. Pat. Nos. 5,700,637, 5,556,752, 5,744,305, 4,631,211, 5,445,934, 5,252,743, 4,713,326, 5,424,186, and 4,689,405 the disclosures of which are herein incorporated by reference in their entirety.

[0100] Addressable arrays comprising sequences first disclosed in SEQ ID NOS:1-1,461 can be used to identify and characterize the temporal and tissue specific expression of a gene. These addressable arrays incorporate oligonucleotide sequences of sufficient length to confer the required specificity, yet be within the limitations of the production technology. The length of these probes is within a range of between about 8 to about 2000 nucleotides. Preferably the probes consist of 60 nucleotides and more preferably 25 nucleotides from the sequences first disclosed in SEQ ID NOS:1-1,461.

[0101] For example, a series of the described GTS oligonucleotide sequences, or the complements thereof, can be used in chip format to represent all or a portion of the described GTS sequences. The oligonucleotides, typically between about 16 to about 40 (or any whole number within the stated range) nucleotides in length can partially overlap each other and/or the GTS sequence may be represented using oligonucleotides that do not overlap. Accordingly, the described GTS polynucleotide sequences shall typically comprise at least about two or three distinct oligonucleotide sequences of at least about 8 nucleotides in length that are each first disclosed in the described Sequence Listing. Such oligonucleotide sequences can begin at any nucleotide present within a sequence in the Sequence Listing and proceed in either a sense (5′-to-3′) orientation vis-a-vis the described sequence or in an antisense orientation.

[0102] Microarray-based analysis allows the discovery of broad patterns of genetic activity, providing new understanding of gene functions and generating novel and unexpected insight into transcriptional processes and biological mechanisms. The use of addressable arrays comprising sequences first disclosed in SEQ ID NOS:1-1,461 provides detailed information about transcriptional changes involved in a specific pathway, potentially leading to the identification of novel components or gene functions that manifest themselves as novel phenotypes.

[0103] Probes consisting of sequences first disclosed in SEQ ID NOS:1-1,461 can also be used in the identification, selection and validation of novel molecular targets for drug discovery. The use of these unique sequences permits the direct confirmation of drug targets and recognition of drug dependent changes in gene expression that are modulated through pathways distinct from the drugs intended target. These unique sequences therefore also have utility in defining and monitoring both drug action and toxicity.

[0104] As an example of utility, the sequences first disclosed in SEQ ID NOS:1-1,461 can be utilized in microarrays or other assay formats, to screen collections of genetic material from patients who have a particular medical condition. These investigations can also be carried out using the sequences first disclosed in SEQ ID NOS:1-1,461 in silico and by comparing previously collected genetic databases and the disclosed sequences using computer software known to those in the art.

[0105] Thus the sequences first disclosed in SEQ ID NOS:1-1,461 can be used to identify mutations associated with a particular disease and also as a diagnostic or prognostic assay.

[0106] Although the presently described GTSs have been specifically described using nucleotide sequence, it should be appreciated that each of the GTSs can uniquely be described using any of a wide variety of additional structural attributes, or combinations thereof. For example, a given GTS can be described by the net composition of the nucleotides present within a given region of the GTS in conjunction with the presence of one or more specific oligonucleotide sequence(s) first disclosed in the GTS. Alternatively, a restriction map specifying the relative positions of restriction endonuclease digestion sites, or various palindromic or other specific oligonucleotide sequences can be used to structurally describe a given GTS. Such restriction maps, which are typically generated by widely available computer programs (e.g., the University of Wisconsin GCG sequence analysis package, SEQUENCHER 3.0, Gene Codes Corp., Ann Arbor, Mich., etc.), can optionally be used in conjunction with one or more discrete nucleotide sequence(s) present in the GTS that can be described by the relative position of the sequence relative to one or more additional sequence(s) or one or more restriction sites present in the GTS.

### 5.5.2. Detection of the Gene Products of the Current Invention

[0107] Antibodies directed against wild type or mutant gene products of the current invention or conserved variants or peptide fragments thereof, which are discussed above in Section 5.4 may also be used as diagnostics and prognostics for disorders affecting development and cellular differentiation, as described herein. Such diagnostic methods, may be used to detect abnormalities in the level of gene expression, or abnormalities in the structure and/or temporal, tissue, cellular, or subcellular location of the respective gene product, and may be performed in vivo or in vitro, such as, for example, on biopsy tissue.

[0108] The tissue or cell type to be analyzed will generally include those which are known, or suspected, to contain cells that express the respective gene. The protein isolation methods employed herein may, for example, be such as those described in Harlow and Lane (Harlow, E. and Lane, D., 1988, “Antibodies: A Laboratory Manual”, Cold Spring Harbor Laboratory Press, Cold Spring Harbor, N.Y.), which is incorporated herein by reference in its entirety. The isolated cells can be derived from cell culture or from a patient. The analysis of cells taken from culture may be a necessary step in the assessment of cells that could be used as part of a cell-based gene therapy technique or, alternatively, to test the effect of compounds on the expression of the respective gene.

[0109] For example, antibodies, or fragments of antibodies, such as those described above in Section 5.4 are also useful in the present invention to quantitatively or qualitatively detect the presence of gene products of the current invention or conserved variants or peptide fragments thereof. This can be accomplished, for example, by immunofluorescence techniques employing a fluorescently labeled antibody (see below, this Section) coupled with light microscopic, flow cytometric, or fluorimetric detection.

[0110] The antibodies (or fragments thereof) or fusion or conjugated proteins useful in the present invention may, additionally, be employed histologically, as in immunofluorescence, immunoelectron microscopy or non-immuno assays, for in situ detection of gene products of the current invention or conserved variants or peptide fragments thereof, or for catalytic subunit binding (in the case of labeled catalytic subunit fusion protein).

[0111] In situ detection may be accomplished by removing a histological specimen from a patient, and applying thereto a labeled antibody or fusion protein of the present invention. The antibody (or fragment) or fusion protein is preferably applied by overlaying the labeled antibody (or fragment) onto a biological sample. Through the use of such a procedure, it is possible to determine not only the presence of the gene product of the current invention, or conserved variants or peptide fragments, but also its distribution in the examined tissue. Using the present invention, those of ordinary skill will readily perceive that any of a wide variety of histological methods (such as staining procedures) can be modified in order to achieve such in situ detection.

[0112] Immunoassays and non-immunoassays for gene products of the current invention or conserved variants or peptide fragments thereof will typically comprise incubating a sample, such as a biological fluid, a tissue extract, freshly harvested cells, or lysates of cells which have been incubated in cell culture, in the presence of a detectably labeled antibody capable of identifying the respective gene products of interest or conserved variants or peptide fragments thereof, and detecting the bound antibody by any of a number of techniques well-known in the art.

[0113] The biological sample may be brought in contact with and immobilized onto a solid phase support or carrier such as nitrocellulose, or other solid support which is capable of immobilizing cells, cell particles or soluble proteins. The support may then be washed with suitable buffers followed by treatment with the detectably labeled antibody specific to the peptide or protein of interest of the current invention or with fusion protein. The solid phase support may then be washed with the buffer a second time to remove unbound antibody or fusion protein. The amount of bound label on solid support may then be detected by conventional means.

[0114] “Solid phase support or carrier” is intended to encompass any support capable of binding an antigen or an antibody. Well-known supports or carriers include glass, polystyrene, polypropylene, polyethylene, dextran, nylon, amylases, natural and modified celluloses, polyacrylamides, gabbros, and magnetite. The nature of the carrier can be either soluble to some extent or insoluble for the purposes of the present invention. The support material may have virtually any possible structural configuration so long as the coupled molecule is capable of binding to an antigen or antibody. Thus, the support configuration may be spherical, as in a bead, or cylindrical, as in the inside surface of a test tube, or the external surface of a rod. Alternatively, the surface may be flat such as a sheet, test strip, etc. Preferred supports include polystyrene beads. Those skilled in the art will know many other suitable carriers for binding antibody or antigen, or will be able to ascertain the same by use of routine experimentation.

[0115] The binding activity of a given lot of antibody or fusion protein may be determined according to well known methods. Those skilled in the art will be able to determine operative and optimal assay conditions for each determination by employing routine experimentation.

[0116] With respect to antibodies, one of the ways in which the antibody can be detectably labeled is by linking the same to an enzyme and use in an enzyme immunoassay (EIA) (Voller, “The Enzyme Linked Immunosorbent Assay (ELISA)”, 1978, Diagnostic Horizons 2:1-7, Microbiological Associates Quarterly Publication, Walkersville, Md.); Voller et al., 1978, J. Clin. Pathol. 31:507-520; Butler, 1981, Meth. Enzymol. 73:482-523; Maggio (ed.), 1980, Enzyme Immunoassay, CRC Press, Boca Raton, Fla.,; Ishikawa et al., (eds.), 1981, Enzyme Immunoassay, Kgaku Shoin, Tokyo). The enzyme which is bound to the antibody will react with an appropriate substrate, preferably a chromogenic substrate, in such a manner as to produce a chemical moiety which can be detected, for example, by spectrophotometric, fluorimetric or by visual means. Enzymes which can be used to detectably label the antibody include, but are not limited to, malate dehydrogenase, staphylococcal nuclease, delta-5-steroid isomerase, yeast alcohol dehydrogenase, alpha-glycerophosphate, dehydrogenase, triose phosphate isomerase, horseradish peroxidase, alkaline phosphatase, asparaginase, glucose oxidase, beta-galactosidase, ribonuclease, urease, catalase, glucose-6-phosphate dehydrogenase, glucoamylase and acetylcholinesterase. The detection can be accomplished by calorimetric methods which employ a chromogenic substrate for the enzyme. Detection may also be accomplished by visual comparison of the extent of enzymatic reaction of a substrate in comparison with similarly prepared standards.

[0117] Detection may also be accomplished using any of a variety of other immunoassays. For example, by radioactively labeling the antibodies or antibody fragments, it is possible to detect the peptide or protein of interest through the use of a radioimmunoassay (RIA) (see, for example, Weintraub, B., Principles of Radioimmunoassays, Seventh Training Course on Radioligand Assay Techniques, The Endocrine Society, March, 1986, which is incorporated by reference herein). The radioactive isotope can be detected by such means as the use of a gamma counter or a scintillation counter or by autoradiography.

[0118] It is also possible to label the antibody with a fluorescent compound. When the fluorescently labeled antibody is exposed to light of the proper wave length, its presence can then be detected due to fluorescence. Among the most commonly used fluorescent labeling compounds are fluorescein isothiocyanate, rhodamine, phycoerythrin, phycocyanin, allophycocyanin and fluorescamine.

[0119] The antibody can also be detectably labeled using fluorescence emitting metals such as ¹⁵²Eu, or others of the lanthanide series. These metals can be attached to the antibody using such metal chelating groups as diethylenetriaminepentaacetic acid (DTPA) or ethylenediaminetetraacetic acid (EDTA).

[0120] The antibody also can be detectably labeled by coupling it to a chemiluminescent compound. The presence of the chemiluminescent-tagged antibody is then determined by detecting the presence of luminescence that arises during the course of a chemical reaction. Examples of particularly useful chemiluminescent labeling compounds are luminol, isoluminol, theromatic acridinium ester, imidazole, acridinium salt and oxalate ester.

[0121] Likewise, a bioluminescent compound may be used to label the antibody of the present invention. Bioluminescence is a type of chemiluminescence found in biological systems in, which a catalytic protein increases the efficiency of the chemiluminescent reaction. The presence of a bioluminescent protein is determined by detecting the presence of luminescence. Important bioluminescent compounds for purposes of labeling are luciferin, luciferase and aequorin.

[0122] An additional use of a peptide or polypeptide encoded by an oligonucleotide or polynucleotide sequence first disclosed in at least one of the GTS sequences of SEQ ID NOS: 1-1,461 involves incorporating the sequence into a phage display, or other peptide library/binding, system that can be used to screen for proteins, or other ligands, that are capable of binding to an amino acid sequence encoded by an oligonucleotide or polynucleotide sequence first disclosed in at least one of the GTS sequences of SEQ ID NOS: 1-1,461 (see U.S. Pat. Nos. 5,270,170, and 5,432,018, herein incorporated by reference in their entirety). Moreover, peptide arrays comprising a novel amino acid sequence corresponding to a portion of at least one of the polynucleotide sequences first disclosed in SEQ ID NOS: 1-1,461 can be generated and screened essentially as described in U.S. Pat. Nos. 5,143,854, 5,405,783, and 5,252,743, the complete disclosures of which are herein incorporated by references.

[0123] Additionally, the presently described GTSs, or primers derived therefrom, can be used to screen spatially addressable arrays, or pools therefrom, of clones present in a full-length human cDNA library. The 96 well microtiter plate format is especially well suited to the screening, by PCR for example, of pooled subtractions of cDNA clones.

### 5.6. Screening Assays for Compounds that Modulate the Expression or Activity of Peptides and Proteins of the Current Invention

[0124] The following assays are designed to identify compounds that interact with (e.g., bind to) peptides and proteins at least partially encoded by one of SEQ ID NOS: 1-1,461 (i.e. peptides or proteins of the current invention) compounds that interact with (e.g., bind to) intracellular proteins that interact with peptides and proteins of the current invention, compounds that interfere with the interaction of peptides and proteins of the current invention with each other and with other intracellular proteins involved in developmental and cell differentiation processes, and to compounds which modulate the activity of genes of the current invention (i.e., modulate the level of expression of genes of the current invention) or modulate the level of gene products of the current invention. Assays may additionally be utilized which identify compounds which bind to gene regulatory sequences (e.g., promoter sequences) and which may modulate the expression of genes of the current invention. See e.g., Platt, K. A., 1994, J. Biol. Chem. 269:28558-28562, which is incorporated herein by reference in its entirety.

[0125] Compounds that can be screened in accordance with the invention include, but are not limited to, peptides, antibodies and fragments thereof, prostaglandins, lipids and other organic compounds (e.g., terpines, peptidomimetics) that bind to the peptide or protein of interest of the current invention and either mimic the activity triggered by the natural ligand (i.e., agonists) or inhibit the activity triggered by the natural ligand (i.e., antagonists); as well as peptides, antibodies or fragments thereof, and other organic compounds that mimic the peptide or protein of interest of the current invention (or a portion thereof) and bind to and “neutralize” natural ligand.

[0126] Such compounds may include, but are not limited to, peptides such as, for example, soluble peptides, including but not limited to members of random peptide libraries (see, e.g., Lam, K. S. et al., 1991, Nature 354:82-84; Houghten, R. et al., 1991, Nature 354:84-86), and combinatorial chemistry-derived molecular library peptides made of D- and/or L-configuration amino acids, phosphopeptides (including, but not limited to members of random or partially degenerate, directed phosphopeptide libraries; see, e.g., Songyang, Z. et al., 1993, Cell 72:767-778); antibodies (including, but not limited to, polyclonal, monoclonal, humanized, anti-idiotypic, chimeric or single chain antibodies, and Fab, F(ab′)₂ and Fab expression library fragments, and epitope-binding fragments thereof); and small organic or inorganic molecules.

[0127] Other compounds that can be screened in accordance with the invention include, but are not limited to, small organic molecules that are able to gain entry into an appropriate cell (e.g., in ES cells) and affect the expression of a gene of the current invention or some other gene involved in development and cell differentiation (e.g., by interacting with the regulatory region or transcription factors involved in gene expression); or such compounds that affect the activity of the peptide or protein of interest of the current invention, e.g., by inhibiting or enhancing the binding of such peptide or protein to another cellular peptide or protein, or other factor, necessary for catalysis, signal transduction, or the like, that is involved in developmental or cell differentiation processes.

[0128] Computer modeling and searching technologies permit the identification of compounds, or the improvement of already identified compounds, that can modulate the expression or activity of peptides or proteins of interest of the current invention. Having identified such a compound or composition, the active sites or regions are identified. Such active sites might typically be the binding partner sites, such as, for example, the interaction domains of the peptides and proteins of the current invention with their respective binding partners. The active site can be identified using methods known in the art including, for example, from study of the amino acid sequences of peptides, from the nucleotide sequences of nucleic acids, or from study of complexes of the relevant compound or composition with its natural ligand. In the latter case, chemical or X-ray crystallographic methods can be used to find the active site by finding where on the factor the complexed ligand is found.

[0129] Next, the three dimensional geometric structure of the active site is determined. This can be done by known methods, including X-ray crystallography, which can determine a complete molecular structure. On the other hand, solid or liquid phase NMR can be used to determine certain intra-molecular distances. Any other experimental method of structure determination can be used to obtain partial or complete geometric structures. The geometric structures may be measured with a complexed ligand, natural or artificial, which may increase the accuracy of the active site structure determined.

[0130] If an incomplete or insufficiently accurate structure is determined, the methods of computer based numerical modeling can be used to complete the structure or improve its accuracy. Any recognized modeling method may be used, including parameterized models specific to particular biopolymers such as proteins or nucleic acids, molecular dynamics models based on computing molecular motions, statistical mechanics models based on thermal ensembles, or combined models. For most types of models, standard molecular force fields, representing the forces between constituent atoms and groups, are necessary, and can be selected from force fields known in physical chemistry. The incomplete or less accurate experimental structures can serve as constraints on the complete and more accurate structures computed by these modeling methods.

[0131] Finally, having determined the structure of the active site, either experimentally, by modeling, or by a combination, candidate modulating compounds can be identified by searching databases containing compounds along with information on their molecular structure. Such a search seeks compounds having structures that match the determined active site structure and that interact with the groups defining the active site. Such a search can be manual, but is preferably computer assisted. These compounds found from this search are potential modulating compounds of the peptides and proteins of interest of the current invention.

[0132] Alternatively, these methods can be used to identify improved modulating compounds from an already known modulating compound or ligand. The composition of the known compound can be modified and the structural effects of modification can be determined using the experimental and computer modeling methods described above applied to the new composition. The altered structure is then compared to the active site structure of the compound to determine if an improved fit or interaction results. In this manner systematic variations in composition, such as by varying side groups, can be quickly evaluated to obtain modified modulating compounds or ligands of improved specificity or activity.

[0133] Further experimental and computer modeling methods useful to identify modulating compounds based upon identification of the active sites of peptides and proteins of interest of the current invention, and related factors involved in development, cellular differentiation, and other cellular processes will be apparent to those of skill in the art.

[0134] Examples of molecular modeling systems are the CHARM and QUANTA programs (Polygon Corporation, Waltham, MA). CHARM performs the energy minimization and molecular dynamics functions. QUANTA performs the construction, graphic modeling and analysis of molecular structure. QUANTA allows interactive construction, modification, visualization, and analysis of the behavior of molecules with each other.

[0135] A number of articles review computer modeling of drugs interactive with specific proteins, such as Rotivinen et al., 1988, Acta Pharmaceutical Fennica 97:159-166; Ripka, New Scientist 54-57 (Jun. 16, 1988); McKinaly and Rossmann, 1989, Annu. Rev. Pharmacol. Toxicol. 29:111-122; Perry and Davies, OSAR: Quantitative Structure-Activity Relationships in Drug Design pp. 189-193 (Alan R. Liss, Inc. 1989); Lewis and Dean, 1989, Proc. R. Soc. Lond. 236:125-140 and 141-162; and, with respect to a model receptor for nucleic acid components, Askew et al., 1989, J. Am. Chem. Soc. 111:1082-1090. Other computer programs that screen and graphically depict chemicals are available from companies such as BioDesign, Inc. (Pasadena, Calif.), Allelix, Inc. (Mississauga, Ontario, Canada), and Hypercube, Inc. (Cambridge, Ontario). Although these are primarily designed for application to drugs specific to particular proteins, they can be adapted to the design of drugs specific to regions of DNA or RNA, once that region is identified.

[0136] Although described above with reference to the design and generation of compounds which could alter binding, one could also screen libraries of known compounds, including natural products or synthetic chemicals, and biologically active materials, including proteins, for compounds which are inhibitors or activators.

[0137] Compounds identified via assays such as those described herein may be useful, for example, in elaborating the biological function of the gene products of interest of the current invention, and for ameliorating disorders affecting development and cell differentiation. Assays for testing the effectiveness of compounds, identified by, for example, techniques such as those described below.

### 5.6.1. In vitro Screening Assays for Compounds that Bind to Peptides and Proteins of the Current Invention

[0138] In vitro systems may be designed to identify compounds capable of interacting with (e.g., binding to) peptides and proteins of interest of the current invention, fragments thereof, and variants thereof. The identified compounds can be useful, for example, in modulating the activity of wild type and/or mutant gene products of the current invention; may be utilized in screens for identifying compounds that disrupt normal interactions of the peptides and proteins of the current invention with other factors, like, for example, other peptides and proteins; or may in themselves disrupt such interactions.

[0139] The principle of the assays used to identify compounds that bind to the peptides and proteins of the current invention involves preparing a reaction mixture of the peptides and proteins of interest that are disclosed by the current invention and a test compound under conditions and for a time sufficient to allow the two components to interact and bind, thus forming a complex that can be removed from and/or detected in the reaction mixture. The peptides and proteins of the current invention that are used can vary depending upon the goal of the screening assay. For example, where agonists of the natural ligand are sought, the full length peptide or protein of interest, or a fusion protein containing the subunit of interest fused to a protein or polypeptide that affords advantages in the assay system (e.g., labeling, isolation of the resulting complex, etc.) can be utilized.

[0140] The screening assays can be conducted in a variety of ways. For example, one method of conducting such an assay involves anchoring the peptide or protein of interest of the current invention, or a fusion protein thereof, or the test substance onto a solid phase and detecting peptide or protein of interest/test compound complexes anchored on the solid phase at the end of the reaction. In one embodiment of such a method, the peptide or protein of interest may be anchored onto a solid surface, and the test compound, which is not anchored, may be labeled, either directly or indirectly. In another embodiment of the method, a peptide or protein of interest of the current invention anchored on the solid phase is complexed with a natural ligand of such peptide or protein of interest. Then, a test compound could be assayed for its ability to disrupt the association of the complex.

[0141] In practice, microtiter plates may conveniently be utilized as the solid phase. The anchored component may be immobilized by non-covalent or covalent attachments. Non-covalent attachment may be accomplished by simply coating the solid surface with a solution of the protein and drying. Alternatively, an immobilized antibody, preferably a monoclonal antibody, specific for the peptide or protein to be immobilized may be used to anchor the peptide or protein to the solid surface. The surfaces may be prepared in advance and stored.

[0142] In order to conduct the assay, the nonimmobilized component is added to the coated surface containing the anchored component. After the reaction is complete, unreacted components are removed (e.g., by washing) under conditions such that any complexes formed will remain immobilized on the solid surface. The detection of complexes anchored on the solid surface can be accomplished in a number of ways. Where the previously nonimmobilized component is pre-labeled, the detection of label immobilized on the surface indicates that complexes were formed. Where the previously nonimmobilized component is not pre-labeled, an indirect label can be used to detect complexes anchored on the surface; e.g., using a labeled antibody specific for the previously nonimmobilized component (the antibody, in turn, may be directly labeled or indirectly labeled with a labeled anti-Ig antibody).

[0143] Alternatively, a reaction can be conducted in a liquid phase, the reaction products separated from unreacted components, and complexes detected; e.g., using an immobilized antibody specific for one component of complexes formed, like, for example, the peptide or protein of interest of the current invention or the test compound to anchor any complexes formed in solution, and a labeled antibody specific for the other component of the possible complex to detect anchored complexes.

### 5.6.2. Assays for Intracellular Proteins that Interact with the Peptides and Proteins of the Current Invention

[0144] Any method suitable for detecting protein-protein interactions can be employed for identifying intracellular peptides and proteins that interact with peptides and proteins of the current invention. Among the traditional methods which may be employed are co-immunoprecipitation, crosslinking and co-purification through gradients or chromatographic columns of cell lysates or proteins obtained from cell lysates and the peptides and proteins of the current invention to identify proteins in the lysate that interact with those peptides and proteins of the current invention. For these assays, the peptides and proteins of the current invention may be used in full length, or in truncated or modified forms or as fusion-proteins. Similarly, the component may be a complex of two or more of the peptides and proteins of the current invention. Once isolated, such an intracellular protein can be identified and can, in turn, be used, in conjunction with standard techniques, to identify proteins with which it interacts. For example, at least a portion of the amino acid sequence of an intracellular protein which interacts with a peptide or protein of the current invention, can be ascertained using techniques well known to those of skill in the art, such as via the Edman degradation technique. (See, e.g., Creighton, 1983, “Proteins: Structures and Molecular Principles”, W.H. Freeman & Co., N.Y., pp.34-49). The amino acid sequence obtained may be used as a guide for the generation of oligonucleotide mixtures that can be used to screen for gene sequences encoding such intracellular proteins. Screening may be accomplished, for example, by standard hybridization or PCR techniques. Techniques for the generation of oligonucleotide mixtures and the screening are well-known. (See, e.g., Ausubel, supra., and PCR Protocols: A Guide to Methods and Applications, 1990, Innis, M. et al., eds. Academic Press, Inc., New York).

[0145] Additionally, methods may be employed which result in the simultaneous identification of genes which encode the intracellular proteins interacting with peptides and proteins of the current invention. These methods include, for example, probing expression libraries, in a manner similar to the well known technique of antibody probing of ëgt11 libraries, using a labeled form of a peptide or protein of the current invention, or a fusion protein, e.g., a peptide or protein at least partially encoded by an GTS of the current invention fused to a marker (e.g., an enzyme, fluor, luminescent protein, or dye), or an Ig-Fc domain.

[0146] One method that detects protein interactions in vivo, the two-hybrid system, is described in detail for illustration only and not by way of limitation. One version of this system has been described (Chien et al., 1991, Proc. Natl. Acad. Sci. USA, 88:9578-9582) and is commercially available from Clontech (Palo Alto, Calif.).

[0147] Briefly, utilizing such a system, plasmids are constructed that encode two hybrid proteins: one plasmid consists of nucleotides encoding the DNA-binding domain of a transcription activator protein fused to a nucleotide sequence of the current invention encoding a peptide or protein of the current invention, a modified or truncated form or a fusion protein, and the other plasmid consists of nucleotides encoding the transcription activator protein's activation domain fused to a cDNA encoding an unknown protein which has been recombined into this plasmid as part of a cDNA library. The DNA-binding domain fusion plasmid and the cDNA library are transformed into a strain of the yeast Saccharomyces cerevisiae that contains a reporter gene (e.g., HBS or lacZ) whose regulatory region contains the transcription activator's binding site. Either hybrid protein alone cannot activate transcription of the reporter gene; the DNA-binding domain hybrid cannot because it does not provide activation function, and the activation domain hybrid cannot because it cannot localize to the activator's binding sites. Interaction of the two hybrid proteins reconstitutes the functional activator protein and results in expression of the reporter gene, which is detected by an assay for the reporter gene product.

[0148] The two-hybrid system or related methodology may be used to screen activation domain libraries for proteins that interact with the “bait” gene product. By way of example, and not by way of limitation, a peptide or protein of the current invention may be used as the bait gene product. Total genomic or cDNA sequences are fused to the DNA encoding an activation domain. This library and a plasmid encoding a hybrid of a bait gene product of the current invention fused to the DNA-binding domain are cotransformed into a yeast reporter strain, and the resulting transformants are screened for those that express the reporter gene. For example, and not by way of limitation, a bait gene sequence of the current invention can be cloned into a vector such that it is translationally fused to the DNA encoding the DNA-binding domain of the GAL4 protein. These colonies are purified and the library plasmids responsible for reporter gene expression are isolated. DNA sequencing is then used to identify the proteins encoded by the library plasmids.

[0149] A cDNA library of the cell line from which proteins that interact with bait gene product of the current invention are to be detected can be made using methods routinely practiced in the art. According to the particular system described herein, for example, the cDNA fragments can be inserted into a vector such that they are translationally fused to the transcriptional activation domain of GAL4. This library can be co-transfected along with the bait gene-GAL4 fusion plasmid into a yeast strain which contains a lacZ gene driven by a promoter which contains GAL4 activation sequence. A cDNA encoded protein, fused to GAL4 transcriptional activation domain, that interacts with bait gene product will reconstitute an active GAL4 protein and thereby drive expression of the HIS3 gene. Colonies which express HIS3 can be detected by their growth on petri dishes containing semi-solid agar based media lacking histidine. The cDNA can then be purified from these strains, and used to produce and isolate the bait gene-interacting protein using techniques routinely practiced in the art.

### 5.6.3. Assays for Compounds that Interfere with Interactions of the Peptides and Proteins of the Current Invention with Intracellular Macromolecules

[0150] The macromolecules that interact with the peptides and proteins of the current invention are referred to, for purposes of this discussion, as “binding partners”. These binding partners are likely to be involved in catalytic reactions or signal transduction pathways, and therefore, in the role of the peptides and proteins of the current invention in development and cell differentiation. It is also desirable to identify compounds that interfere with or disrupt the interaction of such binding partners with the peptides and proteins of the current invention which may be useful in regulating the activity of the peptides and proteins of the current invention and thus control development and cell differentiation disorders associated with the activity of the peptides and proteins of the current invention.

[0151] The basic principle of the assay systems used to identify compounds that interfere with the interaction between the peptides and proteins of the current invention and its binding partner or partners involves preparing a reaction mixture containing the peptides or proteins of the current invention of interest, modified or truncated version thereof, or fusion proteins thereof as described above, and the binding partner under conditions and for a time sufficient to allow the two to interact and bind, thus forming a complex. In order to test a compound for inhibitory activity, the reaction mixture is prepared in the presence and absence of the test compound. The test compound may be initially included in the reaction mixture, or may be added at a time subsequent to the addition of the peptide or protein of the current invention and its binding partner. Control reaction mixtures are incubated without the test compound or with a placebo. The formation of any complexes between the peptide or protein of the current invention and the binding partner is then detected. The formation of a complex in the control reaction, but not in the reaction mixture containing the test compound, indicates that the compound interferes with the interaction of the peptide or protein at least partially encoded by an GTS of the present invention and the interactive binding partner. Additionally, complex formation within reaction mixtures containing the test compound and normal peptide or protein of the current invention may also be compared to complex formation within reaction mixtures containing the test compound and a mutant peptide or protein of the current invention. This comparison may be important in those cases where it is desirable to identify compounds that disrupt interactions of mutant but not normal forms of a peptide or protein of the current invention.

[0152] The assay for compounds that interfere with the interaction of a peptide or protein of the current invention and binding partners can be conducted in a heterogeneous or homogeneous format. Heterogeneous assays involve anchoring either the peptide or protein of the current invention or the binding partner onto a solid phase and detecting complexes anchored on the solid phase at the end of the reaction. In homogeneous assays, the entire reaction is carried out in a liquid phase. In either approach, the order of addition of reactants can be varied to obtain different information about the compounds being tested. For example, test compounds that interfere with the interaction by competition can be identified by conducting the reaction in the presence of the test substance; i.e., by adding the test substance to the reaction mixture prior to or simultaneously with the peptide or protein of the current invention and interactive binding partner. Alternatively, test compounds that disrupt preformed complexes, e.g. compounds with higher binding constants that displace one of the components from the complex, can be tested by adding the test compound to the reaction mixture after complexes have been formed. The various formats are described briefly below.

[0153] In a heterogeneous assay system, either the peptide or protein of the current invention or the interactive binding partner, is anchored onto a solid surface, while the non-anchored species is labeled, either directly or indirectly. In practice, microtiter plates are conveniently utilized. The anchored species may be immobilized by non-covalent or covalent attachments. Non-covalent attachment may be accomplished simply by coating the solid surface with a solution of the peptide or protein of the current invention or binding partner and drying. Alternatively, an immobilized antibody specific for the species to be anchored may be used to anchor the species to the solid surface. The surfaces may be prepared in advance and stored.

[0154] In order to conduct the assay, the partner of the immobilized species is exposed to the coated surface with or without the test compound. After the reaction is complete, unreacted components are removed (e.g., by washing) and any complexes formed will remain immobilized on the solid surface. The detection of complexes anchored on the solid surface can be accomplished in a number of ways. Where the non-immobilized species is pre-labeled, the detection of label immobilized on the surface indicates that complexes were formed. Where the non-immobilized species is not pre-labeled, an indirect label can be used to detect complexes anchored on the surface; e.g., using a labeled antibody specific for the initially non-immobilized species (the antibody, in turn, may be directly labeled or indirectly labeled with a labeled anti-Ig antibody). Depending upon the order of addition of reaction components, test compounds which inhibit complex formation or which disrupt preformed complexes can be detected.

[0155] Alternatively, the reaction can be conducted in a liquid phase in the presence or absence of the test compound, the reaction products separated from unreacted components, and complexes detected; e.g., using an immobilized antibody specific for one of the binding components to anchor any complexes formed in solution, and a labeled antibody specific for the other partner to detect anchored complexes. Again, depending upon the order of addition of reactants to the liquid phase, test compounds which inhibit complex or which disrupt preformed complexes can be identified.

[0156] In an alternate embodiment of the invention, a homogeneous assay can be used. In this approach, a preformed complex of the peptide or protein of the current invention and the interactive binding partner is prepared in which either the peptide or protein of the current invention or its binding partner is labeled, but the signal generated by the label is quenched due to formation of the complex (see, e.g., U.S. Pat. No. 4,109,496 by Rubenstein which utilizes this approach for immunoassays). The addition of a test substance that competes with and displaces one of the species from the preformed complex will result in the generation of a signal above background. In this way, test substances which disrupt peptide or protein of the current invention/intracellular binding partner interaction can be identified.

[0157] In a particular embodiment, a peptide or protein of the current invention can be prepared for immobilization. For example, the peptide or protein of the current invention or a fragment thereof can be fused to a glutathione-S-transferase (GST) gene using a fusion vector, such as pGEX-5X-1, in such a manner that its binding activity is maintained in the resulting fusion protein. The interactive binding partner can be purified and used to raise a monoclonal antibody, using methods routinely practiced in the art and described above. This antibody can be labeled with the radioactive isotope ¹²⁵I, for example, by methods routinely practiced in the art. In a heterogeneous assay, e.g., the GST-peptide or protein of the current invention fusion protein can be anchored to glutathione-agarose beads. The interactive binding partner can then be added in the presence or absence of the test compound in a manner that allows interaction and binding to occur. At the end of the reaction period, unbound material can be washed away, and the labeled monoclonal antibody can be added to the system and allowed to bind to the complexed components. The interaction between the peptide or protein of the current invention and the interactive binding partner can be detected by measuring the amount of radioactivity that remains associated with the glutathione-agarose beads. A successful inhibition of the interaction by the test compound will result in a decrease in measured radioactivity.

[0158] Alternatively, the GST-peptide or protein of the current invention fusion protein and the interactive binding partner can be mixed together in liquid in the absence of the solid glutathione-agarose beads. The test compound can be added either during or after the species are allowed to interact. This mixture can then be added to the glutathione-agarose beads and unbound material is washed away. Again the extent of inhibition of the peptide or protein of the current invention/binding partner interaction can be detected by adding the labeled antibody and measuring the radioactivity associated with the beads.

[0159] In another embodiment of the invention, these same techniques can be employed using peptide fragments that correspond to the binding domains of a peptide or protein of the current invention and/or the interactive or binding partner (in cases where the binding partner is a protein), in place of one or both of the full length proteins. Any number of methods routinely practiced in the art can be used to identify and isolate the binding sites. These methods include, but are not limited to, mutagenesis of the gene encoding one of the proteins and screening for disruption of binding in a co-immunoprecipitation assay. Compensating mutations in the gene encoding the second species in the complex can then be selected. Sequence analysis of the genes encoding the respective proteins will reveal the mutations that correspond to the region of the protein involved in interactive binding. Alternatively, one protein can be anchored to a solid surface using methods described above, and allowed to interact with and bind to its labeled binding partner, which has been treated with a proteolytic enzyme, such as trypsin. After washing, a short, labeled peptide comprising the binding domain may remain associated with the solid material, which can be isolated and identified by amino acid sequencing. Also, once the gene coding for the intracellular binding partner is obtained, short gene segments can be engineered to express peptide fragments of the protein, which can then be tested for binding activity and purified or synthesized.

[0160] For example, and not by way of limitation, a peptide or protein of the current invention can be anchored to a solid material as described, above, by making a GST-peptide or protein of the current invention fusion protein and allowing it to bind to glutathione agarose beads. The interactive binding partner can be labeled with a radioactive isotope, such as 35S, and cleaved with a proteolytic enzyme such as trypsin. Cleavage products can then be added to the anchored GST-peptide or protein of the current invention fusion protein and allowed to bind. After washing away unbound peptides, labeled bound material, representing the intracellular binding partner binding domain, can be eluted, purified, and analyzed for amino acid sequence by well-known methods. Peptides so identified can be produced synthetically or fused to appropriate facilitative proteins using recombinant DNA technology.

### 5.6.4.Assays for Identification of Compounds that Ameliorate Disorders Affecting Development and Cell Differentiation

[0161] Compounds, including but not limited to binding compounds identified via assay techniques such as those described above, can be tested for the ability to ameliorate development and cell differentiation disorder symptoms. The assays described above can identify compounds which affect the activity of peptides and proteins of the current invention (e.g., compounds that bind to the peptides and proteins of the current invention, inhibit binding of their natural ligands, and compounds that bind to a natural ligand of the peptides and proteins of the current invention and neutralize the ligand activity); or compounds that affect the activity of genes encoding peptides and proteins of the current invention (by affecting the expression of those genes, including molecules, e.g., proteins or small organic molecules, that affect or interfere with splicing events so that expression of the genes of interest can be modulated). However, it should be noted that the assays described herein can also identify compounds that modulate signal transduction or catalytic events that the peptides and proteins of the current invention are involved in. The identification and use of such compounds which affect a step in, for example, signal transduction pathways or catalytic events in which any of the peptides and proteins of the current invention are involved in, may modulate the effect of the peptides and proteins of the current invention on developmental or cell differentiation disorders. Such identification and use of such compounds are within the scope of the invention. Such compounds can be used as part of a therapeutic method for the treatment of developmental and cell differentiation disorders.

[0162] The invention encompasses cell-based and animal model-based assays for the identification of compounds exhibiting such an ability to ameliorate developmental and cell differentiation disorder symptoms. Such cell-based assay systems can also be used as the standard to assay for purity and potency of the natural ligand, catalytic subunit, including recombinantly or synthetically produced catalytic subunit and catalytic subunit mutants.

[0163] Cell-based systems can be used to identify compounds which may act to ameliorate developmental or cell differentiation disorder symptoms. Such cell systems can include, for example, recombinant or non-recombinant cells, such as cell lines, which express the gene encoding the peptide or protein of interest of the current invention. For example ES cells, or cell lines derived from ES cells can be used. In addition, expression host cells (e.g., COS cells, CHO cells, fibroblasts, Sf9 cells) genetically engineered to express a functional peptide or protein of the current invention in addition to factors necessary for the peptide or protein of the current invention to fulfil its physiological role of, for example, signal transduction or catalysis, can be used as an end point in the assay.

[0164] In utilizing such cell systems, cells may be exposed to a compound suspected of exhibiting an ability to ameliorate developmental or cell differentiation disorder symptoms, at a sufficient concentration and for a time sufficient to elicit such an amelioration of such disorder symptoms in the exposed cells. After exposure, the cells can be assayed to measure alterations in the expression of the gene encoding the peptide or protein of interest of the current invention, e.g., by assaying cell lysates for the appropriate mRNA transcripts (e.g., by Northern analysis) or for expression of the peptide or protein of interest of the current invention in the cell; compounds which regulate or modulate expression of the gene encoding the peptide or protein of interest of the current invention are valuable candidates as therapeutics. Alternatively, the cells are examined to determine whether one or more developmental or cell differentiation disorder-like cellular phenotypes has been altered to resemble a more normal or more wild type phenotype, or a phenotype more likely to produce a lower incidence or severity of disorder symptoms. Still further, the expression and/or activity of components of pathways or functionally or physiologically connected peptides or proteins of which the peptide or protein of interest of the current invention is a part, can be assayed.

[0165] For example, after exposure of the cells, cell lysates can be assayed for the presence of increased levels of the test compound as compared to lysates derived from unexposed control cells. The ability of a test compound to inhibit production of the assay compound such systems indicates that the test compound inhibits signal transduction initiated by the peptide or protein of interest of the current invention. Finally, a change in cellular morphology of intact cells may be assayed using techniques well known to those of skill in the art.

[0166] In addition, animal-based development or cell differentiation disorder systems, which may include, for example, mice, may be used to identify compounds capable of ameliorating development or cell differentiation disorder-like symptoms. Such animal models may be used as test systems for the identification of drugs, pharmaceuticals, therapies and interventions which may be effective in treating such disorders. For example, animal models may be exposed to a compound, suspected of exhibiting an ability to ameliorate development or cell differentiation disorder symptoms, at a sufficient concentration and for a time sufficient to elicit such an amelioration of development and/or cell differentiation disorder symptoms in the exposed animals. The response of the animals to the exposure may be monitored by assessing the reversal of disorders associated with development and/or cell differentiation disorders. With regard to intervention, any treatments which reverse any aspect of development or cell differentiation disorder-like symptoms should be considered as candidates for human development and/or cell differentiation disorder therapeutic intervention. Dosages of test agents may be determined by deriving dose-response curves, as discussed below.

### 5.7. The Treatment of Disorders Associated with Stimulation of Peptides and Proteins of the Current Invention

[0167] The invention also encompasses methods and compositions for modifying development and cell differentiation and treating development and cell differentiation disorders. For example, one may decrease the level of expression of one or more genes of the current invention, and/or downregulate activity of one or more of the peptides or proteins of interest of the current invention. Thereby, the response of cells, like, for example, ES cells, to factors which activate the physiological responses that enhance the pathological processes leading to developmental and cell differentiation disorders may be reduced and the symptoms ameliorated. Conversely, the response of cells, like, for example, ES cells, to physiological stimuli involving any of the peptides or proteins of the current invention and necessary for proper developmental and cell differentiation processes may be augmented by increasing the activity of one or several of the peptides or proteins of interest of the current invention. Different approaches are discussed below.

### 5.7.1. Inhibition of Peptides and Proteins of the Current Invention to Reduce Development and Cell Differentiation Disorders

[0168] Any method which neutralizes the catalytic or signal transduction activity of peptides and proteins at least partially encoded by the GTSs of the current invention, or which inhibits expression of the genes encoding peptides and proteins (either transcription or translation), can be used to reduce symptoms associated with developmental and cell differentiation disorders.

[0169] In one embodiment, immuno therapy can be designed to reduce the level of endogenous gene expression for the peptides and proteins of the current invention, e.g., using antisense or ribozyme approaches to inhibit or prevent translation of mRNA transcripts; triple helix approaches to inhibit transcription of the genes; or targeted homologous recombination to inactivate or “knock out” the genes or its endogenous promoter.

[0170] Antisense approaches involve the design of oligonucleotides (either DNA or RNA) that are complementary to mRNA specific for peptides and proteins of interest of the current invention. The antisense oligonucleotides will bind to the complementary mRNA transcripts and prevent translation. Absolute complementarity, although preferred, is not required. A sequence “complementary” to a portion of an RNA, as referred to herein, means a sequence having sufficient complementarity to be able to hybridize with the RNA, forming a stable duplex. In the case of double-stranded antisense nucleic acids, a single strand of the normally duplex DNA can thus be tested, or triplex formation can be assayed. The ability to hybridize will depend on both the degree of complementarity and the length of the antisense nucleic acid. Generally, the longer the hybridizing nucleic acid, the more base mismatches with an RNA it may contain and still form a stable duplex (or triplex, as the case may be). One skilled in the art can ascertain a tolerable degree of mismatch by use of standard procedures to determine the melting point of the hybridized complex.

[0171] Oligonucleotides that are complementary to the 5′ end of the message, e.g., the 5′ untranslated sequence up to and including the AUG initiation codon, should work most efficiently at inhibiting translation. However, sequences complementary to the 3′ untranslated sequences of mRNAs have recently shown to be effective at inhibiting translation of mRNAs as well. See generally, Wagner, R., 1994, Nature 372:333-335. Thus, oligonucleotides complementary to either the 5′- or 3′-non-translated, non-coding regions of the mRNAs specific for the peptides and proteins of the current invention could be used in an antisense approach to inhibit translation of those endogenous mRNAs. Oligonucleotides complementary to the 5′ untranslated region of the mRNA should include the complement of the AUG start codon. Antisense oligonucleotides complementary to mRNA coding regions are less efficient inhibitors of translation but could be used in accordance with the invention. Whether designed to hybridize to the 5′-, 3′- or coding region of an mRNA, antisense nucleic acids should be at least six nucleotides in length, and are preferably oligonucleotides ranging from 6 to about 50 nucleotides in length. In specific aspects the oligonucleotide is at least 10 nucleotides, at least 17 nucleotides, at least 25 nucleotides or at least 50 nucleotides.

[0172] Regardless of the choice of target sequence, it is preferred that in vitro studies are first performed to quantitate the ability of the antisense oligonucleotide to inhibit gene expression. It is preferred that these studies utilize controls that distinguish between antisense gene inhibition and nonspecific biological effects of oligonucleotides. It is also preferred that these studies compare levels of the target RNA or protein with that of an internal control RNA or protein. Additionally, it is envisioned that results obtained using the antisense oligonucleotide are compared with those obtained using a control oligonucleotide. It is preferred that the control oligonucleotide is of approximately the same length as the test oligonucleotide and that the nucleotide sequence of the oligonucleotide differs from the antisense sequence no more than is necessary to prevent specific hybridization to the target sequence.

[0173] The oligonucleotides can be DNA or RNA or chimeric mixtures or derivatives or modified versions thereof, single-stranded or double-stranded. The oligonucleotide can be modified at the base moiety, sugar moiety, or phosphate backbone, for example, to improve stability of the molecule, hybridization, etc. The oligonucleotide may include other appended groups such as peptides (e.g., for targeting host cell receptors in vivo), or agents facilitating transport across the cell membrane (see, e.g., Letsinger et al., 1989, Proc. Natl. Acad. Sci. U.S.A. 86:6553-6556; Lemaitre et al., 1987, Proc. Natl. Acad. Sci. 84:648-652; PCT Publication No. WO88/09810, published December 15, 1988), or hybridization-triggered cleavage agents. (See, e.g., Krol et al., 1988, BioTechniques 6:958-976) or intercalating agents. (See, e.g., Zon, 1988, Pharm. Res. 5:539-549). To this end, the oligonucleotide may be conjugated to another molecule, e.g., a peptide, hybridization triggered cross-linking agent, transport agent, hybridization-triggered cleavage agent, etc.

[0174] The antisense oligonucleotide may comprise at least one modified base moiety which is selected from the group including but not limited to 5-fluorouracil, 5-bromouracil, 5-chlorouracil, 5-iodouracil, hypoxanthine, xantine, 4-acetylcytosine, 5-(carboxyhydroxylmethyl) uracil, 5-carboxymethylaminomethyl-2-thiouridine, 5-carboxymethylaminomethyluracil, dihydrouracil, beta-D-galactosylqueosine, inosine, N6-isopentenyladenine, 1-methylguanine, 1-methylinosine, 2,2-dimethylguanine, 2-methyladenine, 2-methylguanine, 3-methylcytosine, 5-methylcytosine, N6-adenine, 7-methylguanine, 5-methylaminomethyluracil, 5-methoxyaminomethyl-2-thiouracil, beta-D-mannosylqueosine, 5′-methoxycarboxymethyluracil, 5-methoxyuracil, 2-methylthio-N6-isopentenyladenine, uracil-5-oxyacetic acid (v), wybutoxosine, pseudouracil, queosine, 2-thiocytosine, 5-methyl-2-thiouracil, 2-thiouracil, 4-thiouracil, 5-methyluracil, uracil-5-oxyacetic acid methylester, uracil-5-oxyacetic acid (v), 5-methyl-2-thiouracil, 3-(3-amino-3-N-2-carboxypropyl) uracil, (acp3)w, and 2,6-diaminopurine.

[0175] The antisense oligonucleotide may also comprise at least one modified sugar moiety selected from the group including but not limited to arabinose, 2-fluoroarabinose, xylulose, and hexose.

[0176] In another embodiment, the antisense oligonucleotide comprises at least one modified phosphate backbone selected from the group consisting of a phosphorothioate, a phosphorodithioate, a phosphoramidothioate, a phosphoramidate, a phosphordiamidate, a methylphosphonate, an alkyl phosphotriester, and a formacetal or analog thereof.

[0177] In yet another embodiment, the antisense oligonucleotide is an alpha-anomeric oligonucleotide. An alpha-anomeric oligonucleotide forms specific double-stranded hybrids with complementary RNA in which, contrary to the usual alpha-units, the strands run parallel to each other (Gautier et al., 1987, Nucl. Acids Res. 15:6625-6641). The oligonucleotide is a 2′-O-methylribonucleotide (Inoue et al., 1987, Nucl. Acids Res. 15:6131-6148), or a chimeric RNA-DNA analogue (Inoue et al., 1987, FEBS Lett. 215:327-330).

[0178] Oligonucleotides of the invention may be synthesized by standard methods known in the art, e.g. by use of an automated DNA synthesizer (such as are commercially available from Biosearch, Applied Biosystems, etc.). As examples, phosphorothioate oligonucleotides may be synthesized by the method of Stein et al., 1988, Nucl. Acids Res. 16:3209. Methylphosphonate oligonucleotides can be prepared by use of controlled pore glass polymer supports (Sarin et al., 1988, Proc. Natl. Acad. Sci. U.S.A. 85:7448-7451).

[0179] While antisense nucleotides complementary to the coding region sequence specific for the peptides and proteins of the current invention could be used, those complementary to the transcribed untranslated region are most preferred.

[0180] The antisense molecules should be delivered to cells which express the peptides and proteins of interest of the current invention in vivo, like, for example, ES cells. A number of methods have been developed for delivering antisense DNA or RNA to cells; e.g., antisense molecules can be injected directly into the tissue or cell derivation site, or modified antisense molecules, designed to target the desired cells (e.g., antisense linked to peptides or antibodies that specifically bind receptors or antigens expressed on the target cell surface) can be administered systemically.

[0181] However, it is often difficult to achieve intracellular concentrations of antisense molecules that are sufficient to suppress translation of endogenous mRNAs. Therefore a preferred approach utilizes a recombinant DNA construct in which the antisense oligonucleotide is placed under the control of a strong pol III or pol II promoter. The use of such a construct to transfect target cells in the patient will result in the transcription of sufficient amounts of single stranded RNAs that will form complementary base pairs with the endogenous transcripts specific for the peptides and proteins of interest of the current invention and thereby prevent translation of the respective mRNAs. For example, a vector can be introduced in vivo such that it is taken up by a cell and directs the transcription of an antisense RNA. Such a vector can remain episomal or become chromosomally integrated, as long as it can be transcribed to produce the desired antisense RNA. Such vectors can be constructed by recombinant DNA technology methods standard in the art. Vectors can be plasmid, viral, or others known in the art, used for replication and expression in mammalian cells. Expression of the sequence encoding the antisense RNA can be by any promoter known in the art to act in mammalian, preferably human cells. Such promoters can be inducible or constitutive. Such promoters include but are not limited to: the SV40 early promoter region (Bernoist and Chambon, 1981, Nature 290:304-310), the promoter contained in the 3′ long terminal repeat of Rous sarcoma virus (Yamamoto et al., 1980, Cell 22:787-797), the herpes thymidine kinase promoter (Wagner et al., 1981, Proc. Natl. Acad. Sci. U.S.A. 78:1441-1445), the regulatory sequences of the metallothionein gene (Brinster et al., 1982, Nature 296:39-42), etc. Any type of plasmid, cosmid, YAC or viral vector can be used to prepare the recombinant DNA construct which can be introduced directly into the tissue or cell derivation site; e.g., the bone marrow. Alternatively, viral vectors can be used which selectively infect the desired tissue or cell type; (e.g., viruses which infect cells of hematopoietic lineage), in which case administration may be accomplished by another route (e.g., systemically).

[0182] Ribozyme molecules designed to catalytically cleave mRNA transcripts specific for the peptides and proteins of interest of the current invention can also be used to prevent translation of the mRNAs of interest and expression of the peptides and proteins encoded by those mRNAs. (See, e.g., PCT International Publication WO90/11364, published October 4, 1990; Sarver et al., 1990, Science 247:1222-1225). While ribozymes that cleave mRNA at site specific recognition sequences can be used to destroy mRNAs, the use of hammerhead ribozymes is preferred. Hammerhead ribozymes cleave mRNAs at locations dictated by flanking regions that form complementary base pairs with the target mRNA. The sole requirement is that the target mRNA have the following sequence of two bases: 5′-UG-3′. The construction and production of hammerhead ribozymes is well known in the art and is described more fully in Haseloff and Gerlach, 1988, Nature, 334:585-591. Preferably the ribozyme is engineered so that the cleavage recognition site is located near the 5′ end of the mRNA of interest; i.e., to increase efficiency and minimize the intracellular accumulation of non-functional mRNA transcripts.

[0183] The ribozymes of the present invention also include RNA endoribonucleases (hereinafter “Cech-type ribozymes”) such as the one which occurs naturally in Tetrahymena Thermophila (known as the IVS, or L-19 IVS RNA) and which has been extensively described by Thomas Cech and collaborators (Zaug et al., 1984, Science, 224:574-578; Zaug and Cech, 1986, Science, 231:470-475; Zaug et al., 1986, Nature, 324:429-433; published International Patent Application No. WO 88/04300 by University Patents Inc.; Been and Cech, 1986, Cell, 47:207-216). The Cech-type ribozymes have an eight base pair active site which hybridizes to a target RNA sequence where after cleavage of the target RNA takes place. The invention encompasses those Cech-type ribozymes which target eight base-pair active site sequences that are present in the mRNAs specific for the peptides and proteins of interest of the current invention.

[0184] As in the antisense approach, the ribozymes can be composed of modified oligonucleotides (e.g. for improved stability, targeting, etc.) and should be delivered to cells which express the peptides and proteins of interest of the current invention in vivo, like, for example, ES cells. A preferred method of delivery involves using a DNA construct “encoding” the ribozyme under the control of a strong constitutive pol III or pol II promoter, so that transfected cells will produce sufficient quantities of the ribozyme to destroy the endogenous messages specific for the peptides and proteins of interest of the current invention and inhibit translation. Because ribozymes unlike antisense molecules, are catalytic, a lower intracellular concentration is required for efficiency.

[0185] Endogenous gene expression can also be reduced by inactivating or “knocking out” the gene of interest specific for a peptide or protein of the current invention or its promoter using targeted homologous recombination. (e.g., see Smithies et al., 1985, Nature 317:230-234; Thomas & Capecchi, 1987, Cell 51:503-512; Thompson et al., 1989 Cell 5:313-321; each of which is incorporated by reference herein in its entirety). For example, a mutant, non-functional peptide or protein of interest of the current invention (or a completely unrelated DNA sequence) flanked by DNA homologous to the endogenous gene encoding said peptide or protein of interest of the current invention (either the coding regions or regulatory regions of the gene) can be used, with or without a selectable marker and/or a negative selectable marker, to transfect cells that express said peptide or protein of interest of the current invention in vivo. Insertion of the DNA construct, via targeted homologous recombination, results in inactivation of the targeted endogenous gene. Such approaches are particularly suited in the agricultural field where modifications to ES cells can be used to generate animal offspring with an inactive copy of a gene encoding a peptide or protein of interest of the current invention (e.g., see Thomas & Capecchi 1987 and Thompson 1989, supra). However this approach can be adapted for use in humans provided the recombinant DNA constructs are directly administered or targeted to the required site in vivo using appropriate viral vectors.

[0186] Alternatively, endogenous expression of a gene of interest can be reduced by targeting deoxyribonucleotide sequences complementary to the regulatory region of said gene (i.e., the promoter and/or enhancers) to form triple helical structures that prevent transcription of the gene of interest in target cells in the body. (See generally, Helene, C. 1991, Anticancer Drug Des., 6(6): 569-84; Helene, C. et al., 1992, Ann, N.Y. Acad. Sci., 660:27-36; and Maher, L. J., 1992, Bioassays 14(12): 807-15).

[0187] In yet another embodiment of the invention, the activity of a peptide or protein of interest of the current invention can be reduced using a “dominant negative” approach. A dominant negative approach takes advantage of the interaction of the peptides or proteins of interest with other peptides or proteins to form complexes, the formation of which is a prerequisite for the peptide or protein of interest of the current invention to exert its physiological activity. To this end, constructs which encode a defective form of the peptide or protein of interest of the current invention can be used in gene therapy approaches to diminish the activity of said peptide or protein of interest in appropriate target cells. Alternatively, targeted homologous recombination can be utilized to introduce such deletions or mutations into the subject's endogenous gene encoding the peptide or protein of interest of the current invention in the appropriate tissue. The engineered cells will express non-functional copies of the peptide or protein of interest of the current invention, thereby downregulating its activity in vivo. Such engineered cells should demonstrate a diminished response to physiological stimuli of the activity of the affected peptide or protein of interest of the current invention, resulting in reduction of the development or cell differentiation disorder phenotype.

### 5.7.2. Restoration or Increase in Expression or Activity of a Peptide or Protein of the Current Invention to Promote Development or Cell Differentiation

[0188] With respect to an increase in the level of normal gene expression and/or gene product activity specific for any of the peptides and proteins of interest of the current invention, the respective nucleic acid sequences can be utilized for the treatment of development and cell differentiation disorders. Where the cause of the development or cell differentiation dysfunction is a defective peptide or protein of the current invention, treatment can be administered, for example, in the form of gene delivery or gene therapy. Specifically, one or more copies of a normal gene or a portion of the gene that directs the production of a gene product exhibiting normal function of the appropriate peptide or protein of the current invention, may be inserted into the appropriate cells within a patient or animal subject, optionally using suitable vectors. Recombinant retroviruses have been widely used in gene transfer or gene delivery experiments and even human clinical trials (see generally, Mulligan, R. C., Chapter 8, In: Experimental Manipulation of Gene Expression, Academic Press, pp. 155-173 (1983); Coffin, J., In: RNA Tumor Viruses, Weiss, R. et al. (eds.), Cold Spring Harbor Laboratory, Vol. 2, pp. 36-38 (1985). Other eucaryotic viruses which have been used as vectors to transduce mammalian cells include adenovirus, papilloma virus, herpes virus, adeno-associated virus, rabies virus, and the like (See generally, Sambrook et al., Molecular Cloning, Cold Spring Harbor Laboratory Press, Cold Spring Harbor, N.Y., Vol. 3:16.1-16.89 (1989). Alternatively, cationic or other lipids may be employed to deliver polynucleotides comprising the described GTS sequences to patients. Additionally, naked DNA comprising one or more GTS sequences, optionally modified by the addition of one or more of, in operable combination and orientation, a promoter, an enhancer, a ribosome entry or ribosome binding site, and/or an in-frame translation initiation codon can be employed to deliver GTSs to a patient. Another use of the above constructs includes “naked” DNA vaccines that can be introduced in vivo alone, or in conjunction with excipients, or microcarrier spheres, nanoparticles or other supporting or dosaging compounds or molecules.

[0189] The gene replacement/delivery therapies described above should be capable of delivering gene sequences to the cell types within patients which express the peptide or protein of interest of the current invention. Alternatively, targeted homologous recombination can be utilized to correct the defective endogenous gene in the appropriate cell type. In animals, targeted homologous recombination can be used to correct the defect in ES cells in order to generate offspring with a corrected trait.

[0190] Finally, compounds identified in the assays described above that stimulate, enhance, or modify the activity of the peptides and proteins of the current invention can be used to achieve proper development and cell differentiation. The formulation and mode of administration will depend upon the physico-chemical properties of the compound.

### 5.8. Pharmaceutical Preparations and Methods of Administration

[0191] Compounds that are determined to affect gene expression of the peptides and proteins of the current invention, or the interaction of those peptides and proteins with any of their binding partners, can be administered to a patient at therapeutically effective doses to treat or ameliorate development and cell differentiation disorders. A therapeutically effective dose refers to that amount of the compound sufficient to result in any amelioration or retardation of disease symptoms, or development and cell differentiation or proliferation disorders.

### 5.8.1. Effective Dose

[0192] Toxicity and therapeutic efficacy of such compounds can be determined by standard pharmaceutical procedures in cell cultures or experimental animals, e.g., for determining the LD₅₀ (the dose lethal to 50% of the population) and the ED₅₀ (the dose therapeutically effective in 50% of the population). The dose ratio between toxic and therapeutic effects is the therapeutic index and it can be expressed as the ratio LD₅₀/ED₅₀. Compounds which exhibit large therapeutic indices are preferred. While compounds that exhibit toxic side effects may be used, care should be taken to design a delivery system that targets such compounds to the site of affected tissue in order to minimize potential damage to uninfected cells and, thereby, reduce side effects.

[0193] The data obtained from the cell culture assays and animal studies can be used in formulating a range of dosage for use in humans. The dosage of such compounds lies preferably within a range of circulating concentrations that include the ED₅₀ with little or no toxicity. The dosage may vary within this range depending upon the dosage form employed and the route of administration utilized. For any compound used in the method of the invention, the therapeutically effective dose can be estimated initially from cell culture assays. A dose may be formulated in animal models to achieve a circulating plasma concentration range that includes the IC₅₀ (i.e., the concentration of the test compound which achieves a half-maximal inhibition of symptoms) as determined in cell culture. Such information can be used to more accurately determine useful doses in humans. Levels in plasma may be measured, for example, by high performance liquid chromatography.

[0194] When the therapeutic treatment of disease is contemplated, the appropriate dosage may also be determined using animal studies to determine the maximal tolerable dose, or MTD, of a bioactive agent per kilogram weight of the test subject. In general, at least one animal species tested is mammalian. Those skilled in the art regularly extrapolate doses for efficacy and avoiding toxicity to other species, including human. Before human studies of efficacy are undertaken, Phase I clinical studies in normal subjects help establish safe doses.

[0195] Additionally, the bioactive agent may be complexed with a variety of well established compounds or structures that, for instance, enhance the stability of the bioactive agent, or otherwise enhance its pharmacological properties (e.g., increase in vivo half-life, reduce toxicity, etc.).

[0196] The above therapeutic agents will be administered by any number of methods known to those of ordinary skill in the art including, but not limited to, administration by inhalation; by subcutaneous (sub-q), intravenous (I.V.), intraperitoneal (I.P.), intramuscular (I.M.), or intrathecal injection; or as a topically applied agent (transderm, ointments, creams, salves, eye drops, and the like).

### 5.8.2. Formulations and Use

[0197] Pharmaceutical compositions for use in accordance with the present invention may be formulated in conventional manner using one or more physiologically acceptable carriers or excipients.

[0198] Thus, the compounds and their physiologically acceptable salts and solvates may be formulated for administration by inhalation or insufflation (either through the mouth or the nose) or oral, buccal, parenteral or rectal administration.

[0199] For oral administration, the pharmaceutical compositions may take the form of, for example, tablets or capsules prepared by conventional means with pharmaceutically acceptable excipients such as binding agents (e.g., pregelatinised maize starch, polyvinylpyrrolidone or hydroxypropyl methylcellulose); fillers (e.g., lactose, microcrystalline cellulose or calcium hydrogen phosphate); lubricants (e.g., magnesium stearate, talc or silica); disintegrants (e.g., potato starch or sodium starch glycolate); or wetting agents (e.g., sodium lauryl sulphate). The tablets may be coated by methods well known in the art. Liquid preparations for oral administration may take the form of, for example, solutions, syrups or suspensions, or they may be presented as a dry product for constitution with water or other suitable vehicle before use. Such liquid preparations may be prepared by conventional means with pharmaceutically acceptable additives such as suspending agents (e.g., sorbitol syrup, cellulose derivatives or hydrogenated edible fats); emulsifying agents (e.g., lecithin or acacia); non-aqueous vehicles (e.g., almond oil, oily esters, ethyl alcohol or fractionated vegetable oils); and preservatives (e.g., methyl or propyl-p-hydroxybenzoates or sorbic acid). The preparations may also contain buffer salts, flavoring, coloring and sweetening agents as appropriate.

[0200] Preparations for oral administration may be suitably formulated to give controlled release of the active compound.

[0201] For buccal administration the compositions may take the form of tablets or lozenges formulated in conventional manner.

[0202] For administration by inhalation, the compounds for use according to the present invention are conveniently delivered in the form of an aerosol spray presentation from pressurized packs or a nebulizer, with the use of a suitable propellant, e.g., dichlorodifluoromethane, trichlorofluoromethane, dichlorotetrafluoroethane, carbon dioxide or other suitable gas. In the case of a pressurized aerosol the dosage unit may be determined by providing a valve to deliver a metered amount. Capsules and cartridges of e.g. gelatin for use in an inhaler or insufflator may be formulated containing a powder mix of the compound and a suitable powder base such as lactose or starch.

[0203] The compounds may be formulated for parenteral administration by injection, e.g., by bolus injection or continuous infusion. Formulations for injection may be presented in unit dosage form, e.g., in ampules or in multi-dose containers, with an added preservative. The compositions may take such forms as suspensions, solutions or emulsions in oily or aqueous vehicles, and may contain formulatory agents such as suspending, stabilizing and/or dispersing agents. Alternatively, the active ingredient may be in powder form for constitution with a suitable vehicle, e.g., sterile pyrogen-free water, before use.

[0204] The compounds may also be formulated as compositions for rectal administration such as suppositories or retention enemas, e.g., containing conventional suppository bases such as cocoa butter or other glycerides.

[0205] In addition to the formulations described previously, the compounds may also be formulated as a depot preparation. Such long acting formulations may be administered by implantation (for example subcutaneously or intramuscularly) or by intramuscular injection. Thus, for example, the compounds may be formulated with suitable polymeric or hydrophobic materials (for example as an emulsion in an acceptable oil) or ion exchange resins, or as sparingly soluble derivatives, for example, as a sparingly soluble salt. The compositions may, if desired, be presented in a pack or dispenser device which may contain one or more unit dosage forms containing the active ingredient. The pack may for example comprise metal or plastic foil, such as a blister pack. The pack or dispenser device may be accompanied by instructions for administration.

[0206] The examples below are provided to illustrate the subject invention. These examples are provided by way of illustration and are not included for the purpose of limiting the invention in any way whatsoever.

### 6.0. EXAMPLES

### 6.1. Generation of a Library of Mutated Mouse ES Cells Defined by GTS Sequences

[0207] The retroviral vector VICTR 3, described in detail in U.S. application Ser. No. 08/728,963, filed Oct. 11, 1996, was used to generate a library of gene trapped ES cell clones that represent a portion of the described GTSs. A plasmid containing the VICTR 3 cassette was constructed by conventional cloning techniques and designed to employ the features described above. Namely, the cassette contained a PGK promoter directing transcription of an exon that encodes the puro marker and ends in a canonical splice donor sequence. At the end of the puromycin exon, sequences were added as described that allow for the annealing of two nested PCR and sequencing primers. The vector backbone was based on pBluescript KS+ from Stratagene Corporation.

[0208] The plasmid construct was linearized by digestion with Sca I which cuts at a unique site in the plasmid backbone. The plasmid was then transfected into the mouse ES cell line AB2.2 by electroporation using a BioRad Genepulser apparatus. After the cells were allowed to recover, gene trap clones were selected by adding puromycin to the medium at a final concentration of 3 μg/ml. Positive clones were allowed to grow under selection for approximately 10 days before being removed and cultured separately for storage and to determine the sequence of the disrupted gene.

[0209] Total RNA was isolated from an aliquot of cells from each of 18 gene trap clones chosen for study. Five micrograms of this RNA was used in a first strand cDNA synthesis reaction using the “RS” primer. This primer has unique sequences (for subsequent PCR) on its 5′ end and nine random nucleotides or nine T (thymidine) residues on it's 3′ end. Reaction products from the first strand synthesis were added directly to a PCR with outer primers specific for the engineered sequences of puromycin and the “RS” primer. After amplification, an aliquot of reaction products were subject to a second round of amplification using primers internal, or nested, relative to the first set of PCR primers. This second amplification provided more reaction product for sequencing and also provided increased specificity for the specifically gene trapped DNA.

[0210] The products of the nested PCR were visualized by agarose gel electrophoresis, and seventeen of the eighteen clones provided at least one band that was visible on the gel with ethidium bromide staining. Most gave only a single band which is an advantage in that a single band is generally easier to sequence. The PCR products were sequenced directly after excess PCR primers and nucleotides were removed by filtration in a spin column (Centricon-100, Amicon). DNA was added directly to dye terminator sequencing reactions (purchased from ABI) using the standard M13 forward primer a region for which was built into the end of the puro exon in all of the PCR fragments.

[0211] Subsequent studies have used both VICTR 3 and VICTR 20. Like VICTR 3, VICTR 20 is exemplary of a family of vectors that incorporate two main functional units: a sequence acquisition component having a strong promoter element (phosphoglycerate kinase 1) active in ES cells that is fused to the puromycin resistance gene coding sequence which lacks a polyadenylation sequence but is followed by a synthetic consensus splice donor sequence (PGKpuroSD); and 2) a mutagenic component that incorporates a splice acceptor sequence fused to a selectable, calorimetric marker gene and followed by a polyadenylation sequence (for example, SAâgeopA or SAIRESâgeopA). Also like VICTR 3, stop codons have been engineered into all three reading frames in the region between the 3′ end of the selectable marker and the splice donor site. A diagrammatic description of structure and functions of VICTRs 3 and 20 is provided in FIG. 1.

[0212] When VICTRs 3, 20, and various variations thereof, were used in the commercial scale application of the presently disclosed invention, many mutagenized ES cell clones were rapidly engineered and obtained. Sequence analysis obtained from these clones has identified a wide variety of both previously identified and novel sequences. Each of the sequences presented in SEQ ID NOS: 1-1,461 identify heretofore unknown coding regions of mammalian genes. Moreover, given that totipotent ES cells have targeted, each of the disclosed mutants effectively represents genetically engineered animals that incorporate the mutated cells and that are preferably capable of germline transmission of the listed mutations.

[0213] The discovery potential of the presently described invention as a genomics resource becomes apparent when one considers that the genes mutated/represented in the Sequence Listing were identified in a few years, whereas simply constructing the mutated cells would have taken many decades of person-hours using conventional methods of genetic manipulation such as targeted homologous recombination.

[0214] Additionally, and perhaps more importantly, the gene trap sequences thus far identified provide novel sequence information (see SEQ ID NOS: 1-1,461), and, because of the functional aspects of the presently described ES cell system, the cellular and developmental functions of these novel sequences can be rapidly established.

[0215] The cloned 3′ RACE products resulting after the target ES cells were infected with VICTR 20 were purified using conventional column chromatography, (e.g., S300 and G-50 columns), and the products were recovered by centrifugation. Purified PCR products were quantified by fluorescence using PicoGreen (Molecular Probes, Inc., Eugene Oregon) as per the manufacturer's instructions.

[0216] Dye terminator cycle sequencing reactions with AmpliTaq® FS DNA polymerase (Perkin Elmer Applied Biosystems, Foster City, CA) were carried out using approximately 7 pmoles of sequencing primer, and approximately 30-120 ng of 3′ template. Unincorporated dye terminators were removed from the completed sequencing reactions using G-50 columns as described above. The reactions were dried under vacuum, resuspended in loading buffer, and electrophoresed through a 6% Long Ranger acrylamide gel (FMC BioProducts, Rockland, Me.) on an ABI Prism® 377 with XL upgrade as per the manufacturer's instructions. The sequences of the resulting amplicons, or GTSs, are described in SEQ ID NOS: 1-1,461.

[0217] All publications and patents mentioned in the above specification are herein incorporated by reference. Various modifications and variations of the described method and system of the invention will be apparent to those skilled in the art without departing from the scope and spirit of the invention. Although the invention has been described in connection with specific preferred embodiments, it should be understood that the invention as claimed should not be unduly limited to such specific embodiments. Indeed, various modifications of the above-described modes for carrying out the invention which are obvious to those skilled in the field of molecular biology or related fields are intended to be within the scope of the following claims.

What is claimed is:

1. An isolated polynucleotide comprising a contiguous stretch of at least about 60 nucleotides first disclosed in at least one of SEQ ID NOS: 1-1,461.

2. An isolated polynucleotide according to claim 1, wherein said polynucleotide sequence comprises at least one of SEQ ID NOS: 1-1,461.

3. An in vitro process for producing an isolated polynucleotide incorporating a sequence capable of hybridizing to a sequence first disclosed in one of SEQ ID NOS: 1-1,461, comprising the steps of:
a) obtaining a polynucleotide template encoding a sequence capable of hybridizing to an GTS of SEQ ID NOS: 1-1,461;
b) contacting said template with a polynucleotide probe comprising at least about 25 contiguous bases first disclosed in SEQ ID NOS: 1-1,461;
c) processing the combined probe and template to allow the specific detection of the combined probe and template; and
d) isolating a clone encoding said template.

4. The process of claim 3 wherein said template is mammalian cDNA.

5. The process of claim 3 wherein said template is mammalian genomic DNA.

6. A process according to claim 4 wherein said template is of human origin.

7. A process for identifying novel polynucleotide sequences comprising the steps of:
a) retrieving a computer readable representation of a polynucleotide sequence first disclosed in at least one of SEQ ID NOS: 1-1,461, or an amino acid sequence encoded thereby, from a computer addressable form of electronic data storage medium;
b) retrieving a computer readable representation of a test polynucleotide or polypeptide sequence from a computer addressable form of electronic data storage medium; and
c) comparing the sequence of said test polynucleotide or polypeptide sequence to a sequence first disclosed in at least one of SEQ ID NOS: 1-1,461, or an amino acid sequence encoded thereby.

8 An isolated murine embryonic stem cell line comprising an engineered retroviral gene trap vector in at least one gene comprising a polynucleotide sequence first disclosed in one of SEQ ID NOS: 1-1,461.

The application's sequence listing, which the Patent Office published only in electronic form, follows.

SEQUENCE LISTING (1461 sequences)

SEQ ID NO: 1 - DNA, 198 bp, Mus musculus
  misc_feature (1)...(198): n = A,T,C or G
aaagaacgcgcaaggtgaatcaaaaaacctggaatgatggttgtgagctgtcacatgganaatcgaaattgaacctgggtcctctggaagggcaaccaatatccttaactgctgagctatttctccagccccttccaccatcggttctcttggcaganaaaacaagagaaaaaggacactatgggaaaaataaagaaa

SEQ ID NO: 2 - DNA, 295 bp, Mus musculus
  misc_feature (1)...(295): n = A,T,C or G
gatcacaaaaacaacacgggctggactaggccccctgcatatatatagcanatgagccacttgatcttcatgcaggtctcccaaacaactggagctggggctgtccctgagtctgttgcctgcttgtggatgctgcgcccctaaatggacagtcttgtctggcctgggtggganaaaatgtgcctactcctcctgcagggacttgatntgcagggggcgggggtgggggagtgacatttganatgggggcttccccttctctttgaaaaagggggatgggggaaggacctgctta

SEQ ID NO: 3 - DNA, 239 bp, Mus musculus
  misc_feature (1)...(239): n = A,T,C or G
atgtgcaggtatggtgtccaggtatgacaggaccacaccattgctgtctttaanaaattgctgggggctggcgaagatggctcagtggttaagagcatcaactgcttttccgaaggtcccgagttcaaatcccagcaaccacatggtggctcacaaccacccgtaaagaaatctgatgccttcttctggaaaatctganganagctacagtgttacttacatataataaataaatcttt

SEQ ID NO: 4 - DNA, 370 bp, Mus musculus
  misc_feature (1)...(370): n = A,T,C or G
aggatcctcacctgcatcaaggnaaacttctctttgccgtagatggagaccattgcanaaaactacaacagatcacaatacggagttgtggaacccanactcaagcgtagcaactatttatgaaaaagatagctcaagaaaaaaaatttttgtttgaaatagggtttctccatgtagccctggctgtcctggaactcnctctgtaaaccaggccagcctctggttcaaaaatctacccacctctgcctcccaantgctgggattaaaggtgcatgctactaattctggcttttaagaggccataantttgaaanaaagcaaagagggacatgcnggaaaatttgttggggaggaaaaggatgaaggaaat

SEQ ID NO: 5 - DNA, 292 bp, Mus musculus
  misc_feature (1)...(292): n = A,T,C or G
gtgctccagtcgctgtgatcccangaactgggatggcttgantcatggataccaaggatggcactgaacttctcatccttctaattcccaagtgttaaaatttcaggtatgggctggtganatggctcagtgggtaanancgcccgactgctcttccgaaggtctgaagttcaaatcccagcaaccacatggtggctcacaaccatctgtaacaagatctgacgccctcttctggagtgtctgaaaacagctacagtgtncttacatataataaataaataaatctttaaaa

SEQ ID NO: 6 - DNA, 224 bp, Mus musculus
  misc_feature (1)...(224): n = A,T,C or G
ttgatcagattgactcgctgccgctgagcatgagaccactggggtggagccttccgacctanccggctctattgttctgtcacctgctgctgctcgtctccaaaacactgctacctgctgaaaggcccttganataatctggaanacagcatccagccgatcacctactggctggcgaagggcaccaaaaatggattgtttggggggggcgggggaagaattgt

SEQ ID NO: 7 - DNA, 311 bp, Mus musculus
  misc_feature (1)...(311): n = A,T,C or G
tttggaagaaagacaataatacaatgagctaacagagtttatcanagaatccgganggctggaatcatggatacccaaggatggcactngaattctcanccttctaattcccaagtgttaanatttcaggtatgggctggtgaaatggctcactgggtaaaancgcccgactgctcttccgaaggtctgaagttcaaatcccagcaaccacatggtggctcacaaccatctgtaacangatctgacgccctcttctggantgtctgaanacagctacggtgtacttacatataataaataaataaatcttt

SEQ ID NO: 8 - DNA, 320 bp, Mus musculus
  misc_feature (1)...(320): n = A,T,C or G
cctcccccaagccctggaagcaggttgattcagacttgacctcgctgccgctgagcatganaccacctggggtggagccttccgacctanccggctctattgttctgtcacctgctgctgctcgtctccaaaacactgctacctgctgaaaggcccttganataatctggagacagcatccagccgatcacctactggctggcgaagggcaccaaaaatggattgtttggggggggcgggggangaatggtggggatgggggatggcggccccnctttataantacanactcttantaaactttggggccttgaacagaa

SEQ ID NO: 9 - DNA, 304 bp, Mus musculus
  misc_feature (1)...(304): n = A,T,C or G
gtcctcctacccccanattcatctccactatccccagccctttcctctgctttccttacccaaacacaggcaaacntctccataaatggagattgcagatagtgganctgcagaaatggactctgttncagactggcctcaaactcaaaaatccgcctgcctctgcctcccgantgccgggaagtcgaacgccaccaagcctggctcacanatctgcaatttaactggtccancttaacttagtttttactaaaagcaaattgcaatgggctatttgtcccnaaattaacaaccttaaaatcta

SEQ ID NO: 10 - DNA, 166 bp, Mus musculus
  misc_feature (1)...(166): n = A,T,C or G
tatggagtcttggctaacctggaacacacagagatgtatcttcccctgctgggattaaaggcctagctcacactagccagaattttacngaagaagaaggaggaggaggaggaggaggaggaggagaaggaggagaaggagaggagaaagaagaagaagaagaaga

SEQ ID NO: 11 - DNA, 218 bp, Mus musculus
  misc_feature (1)...(218): n = A,T,C or G
acttgacctcgctgccgctnancatgagaccacctggggtggagccttccgacctaaccggctctattgttctgtcacctgctgctgctcgtctccaanacactgctacctgctgaaaggcccttgaaataatctgganacagcatccanccgatcacctactggctggcgaagggcaccaaaaatggattgtttggggggggcgggggaagaattgt

SEQ ID NO: 12 - DNA, 221 bp, Mus musculus
aacactgtaactgtcttcagatgcaccagaagagggcgtcagatctcattacggatggttgtgagtcaccatgtggttgctcggatttgaactcaggaccttcggaagaacagtccgtgctcttaccctctgagccatctcaccagccctgatctccattgtatgtgcatgcacatgtaaataaacataataaaacatcgtaagtcttgaaaaaaaaaaca

SEQ ID NO: 13 - DNA, 305 bp, Mus musculus
  misc_feature (1)...(305): n = A,T,C or G
gacaatgtttactagcctccnaaatcttacgcagcttcaagaggttcgcagacgcccttaaactcaaccagaagtccagaacggagtgttcccaagaacaataacaatagtcactaatcaanccgggtgnggtggcacaagcctttantcccagcacttgggaggcagaggcnggcngatttctgagttagaggccagnctgntctacnnagtgngttnnagaacagccanggctatncagagaaaccctgtctcaaaataccanaaaaaacccaaanccaatagtcactgatcatgcacctcct

SEQ ID NO: 14 - DNA, 315 bp, Mus musculus
  misc_feature (1)...(315): n = A,T,C or G
cactgaggaagaaaatgaagtatacgagatgcactcctcaggtaaanacatgtgctcccagtcctgagttcgatccctgcatngcacataattcattaagagaattgactttccngaagtgncaacttntgctccacatgtgcanatgcccanagggccacagaaccccaccccaaataaatcaaattnatnatatcccaccacntgggaggcngaggcaggcgaatattctgagttcgaggccagcctggtctantgagtangttccaggacagccaggactatccagagaaaccctgtctcaaaaaacaaaaa

SEQ ID NO: 15 - DNA, 311 bp, Mus musculus
  misc_feature (1)...(311): n = A,T,C or G
ctggaacaggttgattcagacttgacctcgctgccgctgagcatgagaccacctggggtggagccttccgacctagccggctctattgttctgtcacctgctgctgctcgtctccaanacactgctacctgctgaaaggcccttgagataatctggagacagcatccagccgatcacctactggctggcgaagggcaccaaaaatggattgtttggggggggcgggggaagaatggtgggaatggggaagcggccccctctttataattacaaactcttagtaaactttggggccttgaacagaaaaaaaa

SEQ ID NO: 16 - DNA, 251 bp, Mus musculus
  misc_feature (1)...(251): n = A,T,C or G
ccctggaacaggttgattcagacttgacctcgctgccgctgancatganaccacctggggtggagccttccgacctanccggctctattgttctgtcacctgctgctgctcgtctccaagacactgctacctgctgaaaggcccttgagataatctgganacagcatccagccgatcacctactggctggcgaagggcaccaagaatggattgtttggggggggcgggggaagaatggtgggaatggggga

SEQ ID NO: 17 - DNA, 283 bp, Mus musculus
aggtgtctcggaaaaggtttctctgtgtagttctggctgtcctagaatcagagatccacctacctctgattcaaaggactaggattaaatgcccggttaaagaagatactccagggctggagagatggctcagtggttcagatcacagactgctcgtccagaggtcctgagttcaattcccagcaaccacaaggtggctcacaacacctcttctggtgtgtctaaagacagcaacagtgtattcatgtacattaaatgaataaataaattgtaaaaaaaaaaa

SEQ ID NO: 18 - DNA, 415 bp, Mus musculus
  misc_feature (1)...(415): n = A,T,C or G
aggagggttattatacataaagagaatgtgccagtctacagatggacaanaanagggcgtcagatctcatggangganagttgtgagtcaccatgtggttgctcggatntgaactcangaccttcggancaacaatccgtgctctnacccactgagncttctcaccanccctgatctntntcgtntgtncagncacatatnngtagacatnctaactcntcgtnaatcgggaatggaggaagaanatgtgattgaantttatcangaacaagcggggggtcactcgacggtttagataattctttttattttttatttttcctttccctcaatccttttttatttttaaaaatagttcttttgtaatgtggtgttcaaaatgaaaattgaatactggcactccatctcttaaaca

SEQ ID NO: 19 - DNA, 379 bp, Mus musculus
  misc_feature (1)...(379): n = A,T,C or G
cctgtgcaagagaaaggggcatcaacccacccacaaaaccttctaanccaaagtgtgttctgcctacaacatanncacggataaagatggagcagagattnaggggacggccaaccaatgactgcctaactcgagacccatcccatgggataanagccaacccctgccactattgacactcggctatgcttgcagacagtgtgactccttgacaacagtgtgcctcgttatggttttatgaaaccagttaacagtcttcctccaaggtctctgcttcagtccctgcctccaggaaatgccctgcttgtgtttctgctctgacttcccccagtgatggaatgttaccatggaagataaaataaatctttcccacatcaaa

SEQ ID NO: 20 - DNA, 154 bp, Mus musculus
  misc_feature (1)...(154): n = A,T,C or G
gcctttgggattcaaacgggagccgcttnggactgactggntgcctncntcctacntcnccctcctcncccttctnnttcaaatttatttattatatgtgaatacactgtaccagttntaggacncactaaacaagggcaccacatctcattgt

SEQ ID NO: 21 - DNA, 362 bp, Mus musculus
  misc_feature (1)...(362): n = A,T,C or G
agggttccaagatgcctttgggatcaaacgggagccgctttggactgactggctgccttcctcctcctccccctcctcccccttctgcttcanatttatttattatatgtangtacactgtagcagttgtaggacacactagacgagggcaccagatctcattgtggggggtgtgaaccncccaccatgtggttgctgggatttgaactcaagatcttcanaanagcagtcagggctctaaaccgctgagccatctctccagcctcctgcattccttcttaaggcatgaatgatcccagcataggaagacagtctgccctccctccttttcganccattttccctttcaccatatactcaat

SEQ ID NO: 22 - DNA, 330 bp, Mus musculus
  misc_feature (1)...(330): n = A,T,C or G
aaatgccctttgggattcgtacgggagccgctttggactgactggctgccttcctcctccnccccctcctcccccttctgnttcagatntatttattatatgtaagtacactgtagcagttgtaggacacactagacnagggcaccagatctcattgtgggtggttgtgaaccacccaccatgtggttgctgggatntgaactcaggatcttcagaaaagcagtcagggctctanaccgctgagccatctctccagcctcctgcnttccttcttanggnatnaatgatcccagcatangaagacngctgccctccctccttttcgaacca

SEQ ID NO: 23 - DNA, 219 bp, Mus musculus
  misc_feature (1)...(219): n = A,T,C or G
tcagacttgacctcgctgccgctgaacatgaaaccacctggggtggagccttccgacctanccggctctattgttctgtcacctgctgctgctcgtctccaagacactgctacctgctgaaaggcccttganataatctggagacagcatccagccgatcacctactggctggcgaagggcaccaanaatggattgtttggggggggcgggggaagaat

SEQ ID NO: 24 - DNA, 213 bp, Mus musculus
  misc_feature (1)...(213): n = A,T,C or G
tcacatgtatccctccctggctgggctggaatcantatgtagaccagtaccagactccagctcattctgcctctacttcccaaatgctgatattaaaggcatgtgccgtcactccccgcaaaaaacttttctattttaattgaggtatatttcacaaacaaaaaatgtaaaccttcaagatctataataaaaattaaacaaacacttctcaag

SEQ ID NO: 25 - DNA, 427 bp, Mus musculus
  misc_feature (1)...(427): n = A,T,C or G
ttccagatgcctttgaganaaatgggaggcacaaccatngtcttttggattangcnncacaatggagggngtaangaaggcanccaaacgcttacccttcnctntgcanngatctttcccaggcangngaaanatccncccnacacctacgggaccgcccnccnttnacngnttaactcganacccatctcatgggagaaaaccaacccctgccacnantgacactcggtctatgctngcataacnatgtgactccttgacaacagtgtgcctcnttatggttttatgaaaccagttaacagtcttcctccanggtctctgcttcagtccctgcctccaggaaatgccctgcttgtgtttctgctctgacttcccccagtgatggaatgttaccatggaagataaaataaatctttcccacatcaag

SEQ ID NO: 26 - DNA, 389 bp, Mus musculus
  misc_feature (1)...(389): n = A,T,C or G
cgacgagattcctgtnaacanagaggggcatcagtcccanccncaaaaccttccatcccaanatgtgtgctgtctacnncatacggaaggatnancatcgaccaaacatcgaggggacngccaaccactgactgcctaactcganacccatcccntgggagacanccancccctgccacnantgacactcngtctatgcttgcataacagtgtgactccttgacaacagtgtgcctcgttatggttttatgaaaccagttaacagtcttcctccaaggtctctgcttcagtccctgcctccaggaaatgccctgcttgtgtttctgctctgacttcccccagtgatggaatgttaccatgggaagataaaataaatctttcccacatca

SEQ ID NO: 27 - DNA, 283 bp, Mus musculus
  misc_feature (1)...(283): n = A,T,C or G
atctcaggaactggatggccttgaatcactggatatcaaggatgacnnggaagttctcanccttctaattcccaantgttaaaatttcaggtatgggctggtgagatggctcagtgggtaagancgcccgactgctcttccgaaggtctgaagttcaaatcccagcaaccacatggtggctcacaaccatctgtaacaagatctgacgccctcttctggagtgtctgaanacagctacagtgtacttacatataataaataaataaatctttaaaaaaaaaaa

SEQ ID NO: 28 - DNA, 325 bp, Mus musculus
  misc_feature (1)...(325): n = A,T,C or G
aaaatgcctttgggatcaaacgggagccgctttggactgactggctgccttcctcctcctccccctcctcccccttctgcttcagatttatttattatatgtaagtacactgtagcagttgtaggacacactanacgagggcaccagatctcattgtgggtggttgtgaaccacccaccatgtggttgctgggatttgaactcaggatcttcagaanagcagtcagggctctaaaccgctgaanccatctctccagcctcctgcattccttcttaaggcatgaatgatcccagcataggaaaacagtctgccctccctccttttc

SEQ ID NO: 29 - DNA, 360 bp, Mus musculus
  misc_feature (1)...(360): n = A,T,C or G
aatgaccagcatagccacatcagaaaggcttcacccagcaattgatgganagagatncanatacccacanccaaacatganacanagcctgggaaagagggagaanatnaattgtaggaaccagaggggtcnaaaacaccaagaaaactgcagaatcaaccaacctgaccccataacagctcacggagactgaaccaccaaccagggagcctgcagggaaccgacctangcctctgcacataggtaacagttgtgcagcttgctcttgttaggtgtgggactcctancanagggagcagaggctgtctctgactcctttggctgcctgtcaagtaaatacattaataaaaacttgtttga

SEQ ID NO: 30 - DNA, 286 bp, Mus musculus
  misc_feature (1)...(286): n = A,T,C or G
atctcaggaacctggatggccttgaactcactggatacccaaggatggcactgaacttctcatccttctaattcccaagtgttaanatttcaggtatgggctggtganatggctcagtgggtaanaacgcccgactgctcttccgaaggtctgaagttcaaatcccagcaaccacatggtggctcacaaccatctgtaacaagatctgacgccctcttctggagtgtctgaagacagctacagtgtacttacatataataaataaataaatctttaaaaaaaaaaa

SEQ ID NO: 31 - DNA, 242 bp, Mus musculus
  misc_feature (1)...(242): n = A,T,C or G
tacctcgctgccgctgagcatgataccacctggggtggagccttccgacctacccggctctattgttctgtcacctgctgctgctcgtctccaanacnctgntacctgctcaaangcccttgagataatctggagacancatccaaccnatcacctactggctggngaanggcacccaaaatggattgtntggggggggcgggggaagaatggtgggatgggggagggcggcccctctttat

SEQ ID NO: 32 - DNA, 209 bp, Mus musculus
  misc_feature (1)...(209): n = A,T,C or G
cggagagaggaagggctcnntgaattaagaaaaatctctgctcttccanagggctggttcaattttcaacacccaaatggtggctttccatcacccgtggcttcagttccaaatctgatgcattctggcctccttgggcatcaggcatgcgcattgcatacacatatacacacaggcaaaacacataataataaacattcacttctctc

SEQ ID NO: 33 - DNA, 331 bp, Mus musculus
  misc_feature (1)...(331): n = A,T,C or G
ggtcattgcccagatgttcacatttaggaagcctgtctccacatccctaggactatcccactgtcactgcctcagaaagcctggtctccagagtcgactggtgtagtcccccctccctcagcctgaaacctgcttgctcaggggtggagcttcccgctcaatcgttctgccacgcccactgctggaatctgcccgctttggtgttcggaaacctgcaccaagncccccnactnttggattccnaaantaattggngggaatcgggncccntcccctgcttcataantgcgtgcggaacagtaaaattgagctttgatccgaaaaaaaaaaa

SEQ ID NO: 34 - DNA, 288 bp, Mus musculus
  misc_feature (1)...(288): n = A,T,C or G
aggatctcagggaagnctgggatcggccttgaatcactggatacacaaggatggcactgaacttctcatccttctaattcccaagtgttaanatttcaggtatgggctggtgagatggctcagtgggtaagagcgcccgactgctcttccgaaggtctgaagttcaaatcccagcaaccacatggtggctcacaaccatctgtaacaagatctgacnccctcttctggaatgtctgaaaacanctacagtgtacttacatataataaataaataaatctttaaaaaag

SEQ ID NO: 35 - DNA, 285 bp, Mus musculus
  misc_feature (1)...(285): n = A,T,C or G
actggctgccttcctcctcctccccctcctcccccttctgcttcagatttatttattatatgtaagtacactgtagcagttgtaggacacactagacgagggcaccagatctcattgtgggtggttgtgaaccacccagcangtggttgctgggatttgaactcaggatcttcagaanancagtcagggctctaaaccgctgagcnatctctccancctcctgcattccttcttaaggcatgaatgatcccagcatangaanacantctgccctccctccttttc

SEQ ID NO: 36 - DNA, 321 bp, Mus musculus
  misc_feature (1)...(321): n = A,T,C or G
agatgttcacatttaggaagcctgtctccacatccctaggantatcccactgtcactgcctcaaaagcctggtctccagagtcgactggtgtagtcccccctccctcagcctgaaacctgcttgctcaggggtggagcttcccgctcaatcgttctgccacgcccactgctggaatctgccgctttgctgttcggaaccgtgcacnatgtcacccagctattggattccaagcattaattggcgggaatcgggccccttcccctgcttcataactgcgtgcggaacagtaaaattgagctttgatcaggaaaaaagaaaaa

SEQ ID NO: 37 - DNA, 296 bp, Mus musculus
  misc_feature (1)...(296): n = A,T,C or G
aggttgattcagacttgacctcgctgccgctgagcatganaccacctggggtggagccttccgacctagccggctctattgttctgtcacctgctgctgctcgtctccaanacactgctacctgctgaaaggcccttganataatctggagacagcatccagccgatcacctactggctggcgaagggcaccaagaatggattgtttgggggggcgggggangaatggtgggatggggaagggcggcccctctttataattacagactcttantaaactttggggccttgaacaga

SEQ ID NO: 38 - DNA, 317 bp, Mus musculus
  misc_feature (1)...(317): n = A,T,C or G
gaagaatgaagcccacgccttctgatttatgatgagtgacttgttgccgctagnnttgtntcaacttgacncacctggagttatcncaganaanggagccncccttgaggaantncctcagtgacatccanctgtaaggcattttctcnattagtgatcaatggtgaaaggccccttgtgcgtgggaccatctctgggctggtagtcttgagttctgtaanacagcaggctgagcaagccaggggaagcaagccagtaaagaacatccctccatggcctctgcancagctcctgcttcctgacctgcttgagttcca

SEQ ID NO: 39 - DNA, 381 bp, Mus musculus
  misc_feature (1)...(381): n = A,T,C or G
gacgagacttcctgtgaagagagaggggcatcatcccacccncaaaaccttccancccaaaatgtgttctgnctacnacatacggaagggatnaanatngaccaaacattgaggggacggccaaccagtgactgcctaactcgagacccatcccatggganagagccaacccctgccactattgacactcggctatgcttgcagacagtgtgactccttgacaacagtgtgcctcgttatggttttatgaaaccagttaacagtcttcctccaaggtctctgcttcagtccctgcctccaggaaatgccctgcttgtgtttctgctctgacttcccccagttgatggaatgtnaccatgggaaataaaataaatctttccc

SEQ ID NO: 40 - DNA, 199 bp, Mus musculus
  misc_feature (1)...(199): n = A,T,C or G
ctgccgccaaggttgacatcaanatagcctggaaactgatggttgtgagctgtcacatggagaatcgaaattgaacctgggtcctctggaagggcaaccaatatccttaactgctgagctatttctccagccccttccaccatcggttctcttggcaganaaaacaagagaaaaaggacactatggaaaaataaagaaa

SEQ ID NO: 41 - DNA, 197 bp, Mus musculus
  misc_feature (1)...(197): n = A,T,C or G
aagtcacaaccaagagtaacttcagcnccaggggaaccaacatcctnntganctcctcactaaacatgcacncatctgacggactctctctctctctctctctctgtgtgtgtgtgtntgtctgtctntctgtctctctctctctctgtgtntgtctctctctctctccccnnccacacagagtatataaaaataac

SEQ ID NO: 42 - DNA, 342 bp, Mus musculus
  misc_feature (1)...(342): n = A,T,C or G
atattttaacaaactggcaatcaacagcaatcaacagctatgaaacagcaacctaccctgcctcttgggaccctagcatttatataccctctgaanagttcccagaattccagatgtcacactatcacagaaactatcctcagctggcaaaaaatcatacccctgctagagcatgaggcaaatcatagtcagctgctgtggacagactgaaccagccccataccacacctgggattaaaacaaaaacatgttcttatattnctgtannactntttcttttnntgttagaacatnattttaatattttcaactgttaatattcancaagcagaataattattt

SEQ ID NO: 43 - DNA, 501 bp, Mus musculus
  misc_feature (1)...(501): n = A,T,C or G
attcctgcttccagttgagantccgatcatttgtcgaggctggacctgacactccaacaaggctacacctcctaatattgtcactctttgtgggccaagcattcaaacacatgagtcaaaccaccacagtatcctacctagatctgtgtgtttaactcagagtatatacagactctaggaaactagaaagggacccatgttggcttgttttatatcaacttgatacaagatagagtcatctggaaagagggaacttgactgaaaaatacttctaccagattgacctgtgggttagtcttcggaacattttcttgattgatgactgatgtttgcaagcccagctcagtttggatggtgctatccctgagctggtgttccagaaagcacataagagagcaggctgagcaagccagtgagcagcgtctctccatgttcaactgcatcagttcctgcctccagcctcctgccgtgattgagtcctgtcttgggattctctgcatg

SEQ ID NO: 44 - DNA, 283 bp, Mus musculus
  misc_feature (1)...(283): n = A,T,C or G
ctctgcccaggctggaanacggganangctatgggcattctnacaatatcacngaagggtatngaaaatgatctacagttccagctacctgcctcccaaaacagcatgaagaacagctgttgattcccaatggaattcagttcatccagcctttcagatggatccagtaaggacttcagtcaagtcctgagccttctaagcatacagagactggataacaaatgctaaagctagctttcttaagtctaaccaatttttctaattttcttactcctcccccttt

SEQ ID NO: 45 - DNA, 233 bp, Mus musculus
  misc_feature (1)...(233): n = A,T,C or G
gtaagaactgctgaggagancagactancctgctgcctggaanagactcagacctgcctgaaggagagattctctgtcctgttgagctctccacaagtagtgtaatgaactccagggttcctgctcttggtgatgtagctatatttgagttgaccctgcccctgcccttgnccttttacttatattcttgtgaataactctaataaactcattggattaccagaaaaaaaaaa

SEQ ID NO: 46 - DNA, 331 bp, Mus musculus
  misc_feature (1)...(331): n = A,T,C or G
ctagttacccgacgagacttcctgtgaanagagaggggcatcatcccncccncaaaacttcatcccaanatgtgttctgnctaccncatacggatggattannatcgaccaaacatngaggggacggcnaancagtgactggctaactcgagacccatcccatgggaaagagcctacccctgccactattgacactcgnctatgcttgctgacagtgtgactccttgacaacagtgtgcctcgttatggttttatgaaaccagttaacagtcttcctccaaggtctctgcttcagtccctgcctccaggaaatgccctgcttgtgtttctg

SEQ ID NO: 47 - DNA, 253 bp, Mus musculus
  misc_feature (1)...(253): n = A,T,C or G
ggaagggcgggctctccnanccctngaagcagtgttaattcaacttacctcgctgccgctnagcatnagaccacctggggtggagccttccgacctagccggctctattgttctgtcacctgctgctgctcgtctccaaaacactgctacctgctgaaaggcccttgagataatctggagacagcatccagccnatcacctactggctggcgaagggcaccaaaaatggattgtttggggggggcgggggaag

SEQ ID NO: 48 - DNA, 342 bp, Mus musculus
  misc_feature (1)...(342): n = A,T,C or G
cagaggaggcttcgcccagcaattgatggatagagatncngagacccgnngccaaacntgaggacgaagcctgggaaagagggagaanatganttgtatgaaccngaggggtcnaaaacaccangaaaacctgcnaaatcaaccaacctgaccccatagcagctcacggagactgaaccaccaaccngggagcctgcagggaaccgacctaggcctctgcacatangtaacagttgtgcancttgctcttgttnggtgtgggactcctagcaaanggagcagaggctgtctctgactcctttggctgcctgtcaagtaaatacattaataaaaacttgtttg

SEQ ID NO: 49 - DNA, 388 bp, Mus musculus
  misc_feature (1)...(388): n = A,T,C or G
actggtcactactgtnaccngacaggacttcctgtgaagagagaggggcatcatcccacccacaaaaccttcaacccaaaatgtgttctgcctaccacatacgcagggatnaagatggaccaaagattgaggggacggccaaccagtgactgcctaactcgagacccatcccatgggagagagccaacccctgccactattgacactcggctatgcttgcagacagtgtgactccttgacaacagtgtgcctcgttatggttttatgaaaccagttaacagtcttcctccaaggtctctgcttcagtccctgcctccaggaaatgccctgcttgtgtttctgctctgacttcccccagtgatggaatgttccatggaagataaaataa

SEQ ID NO: 50 - DNA, 213 bp, Mus musculus
  misc_feature (1)...(213): n = A,T,C or G
gacttaggcctcgctgccgctgaancatganaccacctggggtgganccttccgacctanccggctctattgttctgtcacctgctgctgctcgtctccaaaacactgctacctgctgaaaggcccttgagataatctggagacagcatccagccgatcacctactggctggcgaagggcaccaaaaatggattgtttggggggggcggggga

SEQ ID NO: 51 - DNA, 322 bp, Mus musculus
  misc_feature (1)...(322): n = A,T,C or G
ccatcatcagagaggcttccccagcaattgatggaaagagatgcacagacccncagccaaacntgaccacaaagcctgggaaagagggagaanatnaattgtangaaccagaggggtctaaaacnccacgaaaacctgccanatcgaccaacctgaccccatagcagctcacggagactgaaccnccnaccngggagcctgcagggaaccgacctaggcctctgcgcataggtnacagttgtgccgcttgctcttgttnggtgtgggactcctagcagagggagcanaggctgtctctgactcctttggctgcctgtccagt

SEQ ID NO: 52 - DNA, 227 bp, Mus musculus
  misc_feature (1)...(227): n = A,T,C or G
gaagcaggttgattcanacttgacctcgctgccgctgagcatgaaaccacctggggtggagccttccgacctacccggctctattgttctgtcacctgctgctgctcgtctccaaaacactgctacctgctgaaaggcccttgaaataatctggaaacagcatccanccnatcacctactggctggcnaagggcaccaaaaatggattgtttggggggggcggggga

SEQ ID NO: 53 - DNA, 236 bp, Mus musculus
  misc_feature (1)...(236): n = A,T,C or G
cagccctcaagcaggttgattcagacttgacctcnctgccgctgagcatgaaaccacctggggtggagccttccaacctagccggctctattgttctgtcacctgctgctgctcgtctccaaaacactgctacctgctgaaaggcccttgagataatctggaaacagcatccangccaatcacctactggctggcnaagggcaccaanaatggattgtttggggggggcgggggag

SEQ ID NO: 54 - DNA, 160 bp, Mus musculus
  misc_feature (1)...(160): n = A,T,C or G
ggaatcgggtcccctcccccttcctccnnaactgntgtcgcaacggnntgnttngacccttnatcaaaatacncaggttggataaatntgaaaaggcctttcaangaaccgaggtntttgtgatacccaatgggatnttgaaaaacaaccaccccttgtg

SEQ ID NO: 55 - DNA, 164 bp, Mus musculus
  misc_feature (1)...(164): n = A,T,C or G
gggaggccaaaacaaagtcttttgaataaagcaccacaactctaacctgttnggctgccttccttcccaaggcacaaatctttcccagcatgggaaanacctccctccctccctccctnactccctccctcccttttnanccattttcactcttccaccataca

SEQ ID NO: 56 - DNA, 233 bp, Mus musculus
  misc_feature (1)...(233): n = A,T,C or G
cccttgaagcaggttgattcanacttgacctcgctgccgctgagcatgaaaccacctggggtgganccttccnacctanccggctctattgttctgtcacctgctgctgctcgtctccaaaacactgctacctnctgaaaggcccttganataatctggaaacagcatccacccgatcacctactggctggcnaagggcaccaaaaatggattgtttggggggggcgggggaa

SEQ ID NO: 57 - DNA, 147 bp, Mus musculus
  misc_feature (1)...(147): n = A,T,C or G
gcgaccctaggttcgcaaacgcccttaaactcaaccagaantccanaacggantgtncccaaaaacnntancaatagtcnctaatcaagccgggtgtggtggcacaancctttaatcccancacttgggaggcaaaggctggcctat

SEQ ID NO: 58 - DNA, 313 bp, Mus musculus
  misc_feature (1)...(313): n = A,T,C or G
aacgagacttcctgtncaanagagaggggcatcantcccanccccaaaaccttccatcccacnatntnttctgtctaccncatacggaggaattnnnatcgaccaaacatngaggggacggcgaaccagtgactggttanctcganacccttcccatgggaaananccaacccctgccacnantgacactcgtntntgcttgcataacagtgtgactccttgacnacagtntgcctcnttatggttttatgaaaccagttaacagtcttcctccaaggtctctgcttcagtccctgcctccaggaaatgccct

SEQ ID NO: 59 - DNA, 162 bp, Mus musculus
  misc_feature (1)...(162): n = A,T,C or G
aaactgcttgctcagggttggagcttccccgctcaatctttctgccacgcccactgctggaacctgccgctttgctgttccnaanccatcacntgatcaccctgctactggacttcaaaattatttggcgggaattggggccctcccgcttcctttataact

SEQ ID NO: 60 - DNA, 321 bp, Mus musculus
  misc_feature (1)...(321): n = A,T,C or G
gccacctgatggatcacagaaaattcttccagacctcctaagaanaatgatggccaacaactccttanataatccngataaaatagaaataaaaggagcngttttaaatncttncagagtngggtattantaccacnccagataaanncnccacancngganaaagctacaggccagtatccctgataaacatnnatcccnaattncttattangatgcttatgaaagatcctgacagaatgtaaaaggtcncngtaagccctgaaattggcaaaatagatntcgctgttagcanaactagcttcactgatttagaaaaat

SEQ ID NO: 61 - DNA, 227 bp, Mus musculus
  misc_feature (1)...(227): n = A,T,C or G
ccatcgaccaaacatcnaggggacggcgaatcattgactggctanctcgaaacccttcccatgggaaacatcctcccctgccacaanngacactcntntntgcttgcataacagtgtgactccttgacaacagtntgcctcgttatggttttatgaaaccanttaacantcttcctccaaggtctctgcttcagtccctgcctccaggaaatgccctgcttgttttt

SEQ ID NO: 62 - DNA, 214 bp, Mus musculus
  misc_feature (1)...(214): n = A,T,C or G
caaaaaaacttgacttaataatttccgggaggttcataataatnaaaatgctttgncatccacacatcatcaaactctaccaaaggtcctnanttcanntcccancanccntacgatggctcacaaccatctgtaatggaatctgangccctcttctgctgtgtgtnaaaacacctacaattactcatatatatnaaataaatattcttttaaa

SEQ ID NO: 63 - DNA, 263 bp, Mus musculus
  misc_feature (1)...(263): n = A,T,C or G
agagaggggcatcatcccacccncaaaacctncaacccnaaatntgttctgcctacaanatacggaggggataaaaatggaccaaaaattgaggggacggccaaccagtgactgcctaactcgaaacccatcccatggganagagccaacccctgccactatngacnctcggctatgcttgcaaacagtgtgactccttnacaacagtntgccncattatggttnnataaaaccaatnaacagtcttcctccaaggtctctgc

SEQ ID NO: 64 - DNA, 272 bp, Mus musculus
  misc_feature (1)...(272): n = A,T,C or G
caggaacctggatggccttgaatcactggatacccnaggatggcactaaacttctcatccttctaattcccaagtgttaaaatttcaggtatgggctggtganatggctcagtgggtaanagcgcccaactgctcttccaaaggtctnaatttcaaatcccancaaccacatggtggctcacaaccatctntgacaaaatctgacnccctcttctggantgtctnaaaacagctgcagtntacttacatgtaatagataaatgaatctttgg

SEQ ID NO: 65 - DNA, 250 bp, Mus musculus
  misc_feature (1)...(250): n = A,T,C or G
gccaggctatgggtgtcccaggtactgacaggaccacaccattnctgtctttaaaaaacttgctgggggctggcnaaatggctcagtggttaaaaacatcaactgcttttccaaaggtcccaanttcaaatcccagcaaccacatggtggctcacaaccacccgtaaanaaatctnatnccttcttctggaaaatctaangacagctacagtgtacttacatataataaataaatctttaaaaaaaaaaa

SEQ ID NO: 66 - DNA, 234 bp, Mus musculus
  misc_feature (1)...(234): n = A,T,C or G
ttgcctagtgtgtatatatntacacntatgtacaccatgtcatgancctccatggtcgtgaaaggactttggatcccttggaactggcgttacattggtcgtgagcctccatgttggcgctnaaaancaaacctgggttctctggaagcgcagcaantgctcttaaccatcgagccatctctccatctcaaaccacccatntntataaaatgaaaatacataaaccaaaaaaaa

SEQ ID NO: 67 - DNA, 226 bp, Mus musculus
  misc_feature (1)...(226): n = A,T,C or G
gcctagtgtgtatatatgtacacgtatgtacaccatgtcatgaagcctccatggtcgtgaaaggactttggatcccttggaactggcgttacattggtcgtgagcctccatgttggcgctnaaaancaaacctgggttctctggaagcgcagcaantgctcttaaccatcnagccatctctccatctcaaaccacccatgtatataaaatgaaaatacataaacca

SEQ ID NO: 68 - DNA, 190 bp, Mus musculus
  misc_feature (1)...(190): n = A,T,C or G
tataaatgagaggccaaaaaaaantcttttgaatcangnannacaantctaacctgttnggatgccttccttcccaaggcaaaaatctntcccancatgggaaaaacctccctccctccnnccctnagtccctccctccctttnnacccattttcactcttccaccatacactcaataaaataaaataaa

SEQ ID NO: 69 - DNA, 187 bp, Mus musculus
  misc_feature (1)...(187): n = A,T,C or G
tctccagagaagaagaaganaangaagaagaggaggaggaagaagaagaagatcttcagctgagganatgactctcagtggattggacagattttatctgctttgtattaccaatgctaattatgtttcccataanaacctgcttattcgaaagggtctncctgttacttctgggagcctgaccccc

SEQ ID NO: 70 - DNA, 166 bp, Mus musculus
  misc_feature (1)...(166): n = A,T,C or G
cgggatggaggtccgggagacccgcttcatgtgcttcgtacagatcncccacaatgccanccataccannaatataaatagttcttgtgggaatcacggtctcacacccatccttcataactggtgtcccaanaataaaatatganccttgatcagaaaaaaaaaa

SEQ ID NO: 71 - DNA, 223 bp, Mus musculus
  misc_feature (1)...(223): n = A,T,C or G
ggagccagctggatgaanaaaacttgcaaaaaaatttnccgggaggttcanataatgaaaatgctttgccatccacacatcatcanactctaccagaggtcctganttcaattcccaacaaccatannntggctcacaaccatctgtnanggaatctgatgccctcttctgctgtgtgtgaanacaccnacattactcatatntataaaataaatattctttt

SEQ ID NO: 72 - DNA, 139 bp, Mus musculus
caggattcatgctggaagtcacaaccaggagtaacttcagctccaggggacccaacatccttctgacctcctcagaaacctgcacacatctgacggactctctctctctctctctctctgtgtgtgtgtgtgtgtctgt

SEQ ID NO: 73 - DNA, 233 bp, Mus musculus
  misc_feature (1)...(233): n = A,T,C or G
acagtgagggaatgctgaggagaacaggactagcctgctgcctggaaaanactcngacctgcctgaaggagagattctctgtcctgttgagctctccacnagtagtgtaatgaactccagggttcctgctcttggtgatgtacctatatttgagttgaccctgcccctgcccttgcccttttacttatnttcttgtgaataactctaataaactcattggattaccagaaaaa

SEQ ID NO: 74 - DNA, 228 bp, Mus musculus
  misc_feature (1)...(228): n = A,T,C or G
gggactgggccttgaactcactnggaatacccaaggatggcactgaacttctcatccttctaattcccaantgttaaaatttcaggtatgggctggtgaaatggctcagtgggtaaaancgcccnactgctcttccgaaggtctgaanttcaaatcccancaaccacatggtggntcacaaccanctgtaacnanatctgacgccctcttctggagtgtctgaaaaca

SEQ ID NO: 75 - DNA, 208 bp, Mus musculus
  misc_feature (1)...(208): n = A,T,C or G
tatgtacaccatgtcatgancctccatggtcgtgaaaggactttggatcccttggaactggcgttacattggtcgtgagcctccatnttggcgctgaaaagcaaacctgggttctctggaancgcagcaattgctcttaaccatcgagccatctctccatctcaaaccacccatntntataaaatgaaaatacataaaccaaaaaaaa

SEQ ID NO: 76 - DNA, 199 bp, Mus musculus
  misc_feature (1)...(199): n = A,T,C or G
atgcaccaaaaaagggcgtcanatctcattacggatggttgtgantcaccatntggttgctcggatttgaactcaggaccttcggaaaaacagtccgtgctcttaccctctgagccatctcaccagccctgatctccattgtatntgcatgcacatntaaataaacataataaaacatcgtaattcttgaaaaaaaaaa

SEQ ID NO: 77 - DNA, 251 bp, Mus musculus
gacaggatttctctgtagccgtggctgtcctgaaactctgtagaccatgctgacctcaaatttataggagctggagagatggctcagcagctaagagcattgaatgctcttccaataggtcttgagttcaaatcccagcaaccacatggtggctcacaaccatctgtaaagagatctgacgccctcttctggaatgtatgaagacaactacagtgtacttacatataataaataaatctagaaaaaaaaaa

SEQ ID NO: 78 - DNA, 249 bp, Mus musculus
  misc_feature (1)...(249): n = A,T,C or G
cctcccccagccctgaagcaggttgattcanacttgacctcgctgccgctgagcatgagaccacctggggtggagccttccgacctagccggctctattgttctgtcacctgctgctgctcgtctccaagacactgctacctgctgaaaggcccttgagataatctggagacagcatccagccgatcacctactggctggcgaagggcaccaagaatggattgtttggggggggccgggggaggaatgg

SEQ ID NO: 79 - DNA, 387 bp, Mus musculus
agcacttgaagtccttgtaaaagaagagaaacaacactacaaaaaagcagatgggaaaagataatacaaatgaggtaaggactggaaccaatgaaacagaaatgaagagaagaaaatatacaaagaatcaaacaaaattggttctttgaaaagattaacaagattgacaagtctttagctgaaaccttcccccaatatgaagcaggctgagccagaccttgactttgctgccactaagaagatcacctagggtggagcctgcctccctagatcactctattgttcagccactgtcgctgctacctgctgggagtctgcctagctatttccggagactacaccctatcctgcaagtgatcacctgcagctgggcttcaaggatgaatt

SEQ ID NO: 80 - DNA, 323 bp, Mus musculus
aagaacccttgaaacagtacgtgtagcctcccccagcctgaagctggctgttgcaaaccttgctgctactgagaatgagaccacctggggtggagccttccgacctagatggctccattgttctgtcacttgccgctgctctcctccaagacactgctacctgctgagaggcccctgagatattccagaggcacatcctatcctgcacatcctcgcctgcaggctggctccaggcaccaagaatggattggcgggggatgggctttcccctttttaagcacagtctctgagtaaaatctcgggccttgatcagaaaaaaaaaa

SEQ ID NO: 81 - DNA, 318 bp, Mus musculus
  misc_feature (1)...(318): n = A,T,C or G
aagcctcccccaccctgaagcaggttgattcanacttgacctcgctgccgctgagcatgagaccacctggggtggagccttccgacctagccggctctattgttctgtcacctgctgctgctcgtctccaagacactgctacctgctgaaaggcccttgagataatctggagacagcatccagccgatcacctactggctggcgaagggcaccaagaatggattgtttggggggggcgggggaggaatggtgggatggggatgggcggcccctctttataagtncagactcttagtaaactttggggccttgaacaga

SEQ ID NO: 82 - DNA, 176 bp, Mus musculus
agggttccagactgccctttgggattcaaacgggagccgctttggactgactggctgccttcctcctcctccccctcctcccccttctgcttcagatttatttattatatgtaagtacactgtagcagttgtaggacacactagacgagggcaccagatctcattgtgggtggttg

SEQ ID NO: 83 - DNA, 188 bp, Mus musculus
ggttccagactgccctttgggattcaaacgggagccgctttggactgactggctgccttcctcctcctccccctcctcccccttctgcttcagatttatttattatatgtaagtacactgtagcagttgtaggacacactagacgagggcaccagatctcattgtgggtggttgtgaaccacccacca

SEQ ID NO: 84 - DNA, 301 bp, Mus musculus
agcttattgtcccaattgagaggatctgaggctggttatccaaagctgcctggaaatgcagtctgggtgtgtgtggcagtctgaatatgctcggcccagggagcgaagtgtgtcactgtggctgtggacaatgagaccctcatcctaactatgtgggagctagtcttcttctagtggccttcagatgaagatggagaacgcctgcctggatgctgccatgttcccgccttgatgataatgcactgaacctctgaacctgtcgccagccccaattaaacgttgtcctttataaagaaaaaaa

SEQ ID NO: 85 - DNA, 307 bp, Mus musculus
cttggagctatattgtcccaattgagaggatctgaggctggttatccaaagctgcctggaaatgcagtctgggtgtgtgtggcagtctgaatatgctcggcccagggagcgaagtgtgtcactgtggctgtggacaatgagaccctcatcctaactatgtgggagctagtcttcttctagtggccttcagatgaagatggagaacgcctgcctggatgctgccatgttcccgccttgatgataatgcactgaacctctgaacctgtcgccagccccaattaaacgttgtcctttataaagaaaaaaa

SEQ ID NO: 86 - DNA, 366 bp, Mus musculus
  misc_feature (1)...(366): n = A,T,C or G
gcactaacatgctccatgatccccaaaataanaagcaaagaaggaaagagaagagaggaatctgatacaaacagagttgttctttggccacatgaacgtgaatccacaagaaggttaatattataaacatcaagggaattggtgcctttcaagcaagaatgcctcacaggggtcacctcggcaaaactggaagagtcgacaatgtagaaagacaagacctgctggttgtattcgttttcactcaaatgttcatttctcctggaaagatggctcagcagttaagagcactggctgctcttccaaaggacctgggtttgattcccagcaaccacatggtagctcacaactaactgtaactccagttcc

SEQ ID NO: 87 - DNA, 372 bp, Mus musculus
gcacttgaagtccttgtaaaagaagagaaacaacactacaaaaaagcagatgggaaaagataatacaaatgaggtaaggactggaaccaatgaaacagaaatgaagagaagaaaatatacaaagaatcaaacaaaattggttctttgaaaagattaacaagattgacaagtctttagctgaaaccttcccccaatatgaagcaggctgagccagaccttgactttgctgccactaagaagatcacctagggtggagcctgcctccctagatcactctattgttcagccactgtcgctgctacctgctgggagtctgcctagctattccggagactacaccctatcctgcaagtgatcacctgcagctgggct

SEQ ID NO: 88 - DNA, 252 bp, Mus musculus
  misc_feature (1)...(252): n = A,T,C or G
cggttccagactgccctttgggattcaaacgggagccgctttggactgactggctgccttcctcctcctccccctcctcccccttctgcttcagatttatttattatatgtaagtacactgtagcagttgtaggacacactagacgagggcaccagatctcattgngggtggnngggnccccacagtngtntttcagncnatcaaaagnntcaactcnattaataaatctttgacccatgaaaaaaaaagaa

SEQ ID NO: 89 - DNA, 176 bp, Mus musculus
gggttccagactgccctttgggattcaaacgggagccgctttggactgactggctgccttcctcctcctccccctcctcccccttctgcttcagatttatttattatatagtaagtacactgtagcagttgtaggacacactagacgagggcaccagatctcattgtgggtggttg

SEQ ID NO: 90 - DNA, 244 bp, Mus musculus
ggttatataaacagtaagaactgctgaggagaacagactagcctgctgcctggaagagactcagacctgcctgaaggagagattctctgtcctgttgagctctccacaagtagtgtaatgaactccagggttcctgctcttggtgatgtagctatatttgagttgaccctgcccctgcccttgcccttttacttatattcttgtgaataactctaataaactcattggattaccaaaaaaaaaa

SEQ ID NO: 91 - DNA, 402 bp, Mus musculus
ggttcaatcaagttccagtgatatctgccaatcaagtttacacgtgatatctgtcaatcaagttcacagtgatatctgccaatcaagtttacagtgatatctgtcaatcaagttcatagtgatatctgccaatcaagtttacagtgatatctgtcaatcaagttcacagtgatatctgtcaatcaggttcacactgatatctgtgtagctcctttgtctttgctcactttcttaacctttagctgtttggaaaagctaatgcatacaagaaactataatagtcgccgggagtggtggcacacgcctttaatcccagcactcgggaggcagaggcaggcagatttctgaaattcgaggccagcctggtctacaaagtgagttccaggacagccagggctatac

SEQ ID NO: 92 - DNA, 314 bp, Mus musculus
  misc_feature (1)...(314): n = A,T,C or G
aggaaacaactaaagatcactatgcccctaatcctgcttcaccatcatctctagtttttccttttttttttaaatgaaaccnaaatggaaaaatgntancattctgnctaggntcctcccagcagttacctggcaacagccatgtntgcctgattcactntaaagggagctgnttgcccccttntcactctnttancctcttactntttggcccttntccctntttncccctccccttncccctnttcctntctgnctttntctctctttaccccctnagntccccttcccatgccctaaataaacttttttca

SEQ ID NO: 93 - DNA, 409 bp, Mus musculus
  misc_feature (1)...(409): n = A,T,C or G
cacctactgtaacccgacgggacttnctgtgaagagagaggggcatnaacccacccacaaaaccttcancccaaaatgtgttctgcctacaagatacacagggattangatggagcanagattgaggggacngccaancngngactgnctaactcgngacccntnccatggganagagccnacccctgccactattgacactnggctatgcttgnagacagtgtgactccttgacaacagtgtgcctcgttatggttttatgaaaccagttaacagtcttcctccaaggtctctgcttcagtccctgcctccaggaaatgccctgcttgtgtttctgctctgacttcccccagtgatggaatgttaccatggaaagataaaataaatcttttccacatcaaaaaaaaaa

SEQ ID NO: 94 - DNA, 333 bp, Mus musculus
  misc_feature (1)...(333): n = A,T,C or G
tgggtctgcaagaatgtcaacggcnaaanaaacaggaaactagntnngccngnggnncactgntgccctggcctgcagaangntangntgacaggcncncatcccccatgggngccgcacatctgcttctnttactccaccccagcccacanccatgtctnctactggnaaagacctntcctggctcctccaataggcgccattcactcctggaagcggccgngcctnccttccccaacccccatcccccgaattatcatgacacagggagcgtgcttgcctagcatgagtaagaccctggcttcaaatctcancactgtaaaaaataaataa

SEQ ID NO: 95 - DNA, 211 bp, Mus musculus
caagaactgaggcttggtgcctgcagagacaggagacagagaagacagaggagcatgtcggctcccctgagattggagtgtgaggtcgttgtgagtcaccatgtgcttgctccgaactgaacctaggtcctctgcaggagactcttaattcctgagtcatctctccagcttctggcattagtacttttttaatgtgagaaaattaaaaaaa

SEQ ID NO: 96 - DNA, 223 bp, Mus musculus
  misc_feature (1)...(223): n = A,T,C or G
tggtgtgagccgagccttgatggaanccttgcaactagccnttanagaagaaggggagaggggctggaaagatggctcaancgggtnatgaacactgactgctcttccaagagtcctgagttcaattcccancanccacatantggctcacaaccatntgtaatgggatctcatgccctcttctggngtgtctaaagacagctacagtgtactcatatcataa

SEQ ID NO: 97 - DNA, 458 bp, Mus musculus
  misc_feature (1)...(458): n = A,T,C or G
ggtggggtctttcagcgacccggagcaggcagcggcgcgggaggcccttcggnactgnctaaagcnnccaacaaacgaaggggccttggtggngagagtantgacagatntgcctgtgtncanccatctnaagnnanagctagggaactggngctgaccttggnctcttngaaaatgtaaaaacaacaaattccaaacaatgactaagtagaactcttttaagtgtaattaagcatcatccatttaaatgcaactttctatagagccaagtaaattgggcaagtgattatcaatgaaaatagaaatcttaaaaatcactgggggctggagatggctcagtgggtaagaacactgattgctcttccaaaggtcctaagttcaaatcctaacaaccacatggtggctcacagccatctgtagtgagatctgatgccctcttctggtgtgtctgaagacag

SEQ ID NO: 98 - DNA, 182 bp, Mus musculus
  misc_feature (1)...(182): n = A,T,C or G
agttgtctgatcctggacagccttgngattanacgggagccgctttggactgactggctgccttcctcctcctccccctcctcccccttctgcttcagatttatttattatatgtaagtacactgtagcagttgtaggacacactagacgagggcaccagatctcattgtggggtgggttga

SEQ ID NO: 99 - DNA, 350 bp, Mus musculus
  misc_feature (1)...(350): n = A,T,C or G
agtcagagtctattgcgcgcaccggatnggnccgcgntnacgacnctgcnacaggatccttctgcacacgnttattgggagagttngactgcngaggtgangagaccccgagcccanaactggtgctgcttatataggcctaggagaggagngtctcacacctggattggttatgcactacgcctcatttgcntgatcctcntntgatnggctactctntctctgtncctcncagagcctnantatcatacctcatntgcatgtctcacacctgattggttatagnctcaaagcctcattatcatgcccgggccaggcagtgtctttgcaaaaaactttactgcatatgt

SEQ ID NO: 100 - DNA, 332 bp, Mus musculus
  misc_feature (1)...(332): n = A,T,C or G
tgcatgtgaatagaggtgccnatggagaccatgagacgtcngannctgcggagctggagncacanacgcctgtnagccacctgatgaggctntgtgncctcatnctctggacaagcagcccgtgagcttaaccantgagctatttctccagcccctggaccagactgtnctccaccctgacctcnacctttttttaaaaaaagatttatnatangtaagttngctgtagctgncatcagacactccaganagagggagtcagatctccttatggatggttgtaagctnccatatgggtgctgggattngaactcangaccttgggaagagca

SEQ ID NO: 101 - DNA, 301 bp, Mus musculus
  misc_feature (1)...(301): n = A,T,C or G
gtagcctgccccagccngangctggctgctgcaaaccttgctgctactgagaatgagaccacctggggtggagccttccgacctagatggctccattgttctgtcacttgccgctgctctcctccaagacactgctacctgctgagaggcccctgagatattccagaggcacatcctatcctgcacatcctcgcctgcaggctggctccaggcaccaagaatggattggcgggggatgggctttcccctttttaagcacagtctctgagtaaaatctcgggccttgatcagaaaaaaaaaa

SEQ ID NO: 102 - DNA, 252 bp, Mus musculus
gcctcccccagccctgaagcaggttgattcagacttgacctcgctgccgctgagcatgagaccacctggggtggagccttccgacctagccggctctattgttctgtcacctgctgctgctcgtctccaagacactgctacctgctgaaaggcccttgagataatctggagacagcatccagccgatcacctactggctggcgaagggcaccaagaatggattgtttggggggggcgggggaggaatggtgg

SEQ ID NO: 103 - DNA, 164 bp, Mus musculus
gactgccctttgggattcaaacgggagccgctttggactgactggctgccttcctcctcctccccctcctcccccttctgcttcagatttatttattatatgtaagtacactgtagcagttgtaggacacactagacgagggcaccagatctcattgtgggtgg

SEQ ID NO: 104 - DNA, 319 bp, Mus musculus
atgcctcccccagccctgaagcaggttgattcagacttgacctcgctgccgctgagcatgagaccacctggggtggagccttccgacctagccggctctattgttctgtcacctgctgctgctcgtctccaagacactgctacctgctgaaaggcccttgagataatctggagacagcatccagccgatcacctactggctggcgaagggcaccaagaatggattgtttggggggggcgggggaggaatggtgggatggggatgggcggcccctctttataagtacagactcttagtaaactttggggccttgaacaga

SEQ ID NO: 105 - DNA, 211 bp, Mus musculus
  misc_feature (1)...(211): n = A,T,C or G
aggaaacctcgtgagtcggaagcttcccagctgggccctctttaaaaacanggatatttccaaggacacgcctctaatcccagcactcnggaggcaaaggcaggcacatctctgtgcattcgaggttaacctggtctgcagagtaagttccaggacagccagagctatgcaatgaaacccggtctcaaaataaataaataaataaaattag

SEQ ID NO: 106 - DNA, 100 bp, Mus musculus
aagtctcgaaattcgatatcaagctgatccggaacccttaatataacttcgtataatgtatgctataccgaagttattatggtccctcgaaaaaaaaaaa

SEQ ID NO: 107 - DNA, 258 bp, Mus musculus
  misc_feature (1)...(258): n = A,T,C or G
accaacaacccaccccatnactcgggaccctagcatttatagaccctctggaaagncctcaaattccaaatgtcacacaattgcagaaactatctgcagttggcaaaaaacgtgcctctgctagagcactaagcaaatcagagtcagctgctgtggacagaatgaagcagccccatatcccatacgtgggattaaacaaaaatatattcttataatatttctgtggtttttaaataaaccaaaatttcaaaattgtca

SEQ ID NO: 108 - DNA, 536 bp, Mus musculus
  misc_feature (1)...(536): n = A,T,C or G
taaagacgcagatctctgaaatggattcnagangactgtgactgccntgcagtactgagaccnnncctgggtcngntggaaanaacatcggtggtcntacctactgactcgnctctctatccctctatngtatagtttnaanttntatatggggtntgngatatntacctntntgnaggtctgacganaaatttctanggtgtnttctgtcctacattcangattctttctcanggangtcaaagcatagacagcaaacagttttacctgaagagctatctgccccccttgttttgttttggttttttgttgttgttgttgttttttaagacagagatgggggttgggggggctggtgaaatggctcattgggtaaaaacaccaactactcttccaggctgctcttccgaaggtccggaattcanattccagcaaccacatggtggctcacaaccatccgtaacaagatctgacccctcttctggaatgtctgaaaaacactacagtgttcttacatataaataaattaatcttta

SEQ ID NO: 109 - DNA, 306 bp, Mus musculus
cacactgaagcatgttgattcaaacttgactcgctgccgctgagcatgagaccacctggggtggaccttccgacctaccggctctattgttctgtcacctgctgctgctcgtctccaagacactgctacctgctgaaaggcccttgagataatctggagacagcatccagccgatcacctactggctggcgaagggcaccaagaatggattgtttggggggggcgggggaagaatggtgggatggggatgggcggcccctctttataagtacagactcttagtaaactttggggccttgaacagaa

SEQ ID NO: 110 - DNA, 293 bp, Mus musculus
caagttacactgttgctgtcttcagacacaccagaaagaggacatcagatcccattacagatggttgtgagccaccatgtgatgctgggaattcctctggaagaggactcagtgctctcaaccccgtctctccagcccctaacttccttaattctataaaactgtgatacttcaagaattcattttcacattagcacacaaattttggagatattttaaatctgtgctgccaggccatgccattcaaaatgactccagaataaattttctcttattgccttcaaaaaaaaaaa

SEQ ID NO: 111 - DNA, 299 bp, Mus musculus
  misc_feature (1)...(299): n = A,T,C or G
gttgattcagacttgactcgctgccgctgacatgagaccacctggggtggaccttccgacctagccggctctattgttctgtcacctgctgctgctcgtctccaanacactgctacctgctgaaaggcccttgagataatctggagacagcatccagccgatcacctactggctggcgaagggcaccaagaatggattgtttggggggggcgggggaagaatggtgggatggggatgggcggcccctctttataagtacagactcttagtaaactttggggccttgaacagaaaaaaaa

SEQ ID NO: 112 - DNA, 292 bp, Mus musculus
  misc_feature (1)...(292): n = A,T,C or G
gttgattcagacttgacctcgctgccgctgagcatgagaccacctggggtggagccttccgacctagccggctctattgttctgtcacctgctgctgctcgtctccaanacactgctacctgctgaaaggcccttgagataatctggagacagcatccagccgatcacctactggctggcgaagggcaccaagaatggattgtttggggggggcgggggaagaatggtgggatggggatgggcggcccctctttataantacagactcttagtaaactttggggccttgaac

SEQ ID NO: 113 - DNA, 229 bp, Mus musculus
  misc_feature (1)...(229): n = A,T,C or G
atggacgtcttccagaaggatggaccctgataactgctgcctgtgacatcaagaagggagcaacacctgggcgtaatggcgcacgcctttaatcccagacactcgggaagcagaagtatgcggatttctganttcnaagncagccnggtctacanagtgagtnccaggacagccaggtctacncaaagaaaccctgtctcaacacccccccccccccaaaaaaaaaagg

SEQ ID NO: 114 - DNA, 300 bp, Mus musculus
  misc_feature (1)...(300): n = A,T,C or G
tcctgatcggaactgagagcacgaatgctgcacacgttgtgaataaatgctgattatctgctcgctacgaaacgctnacttgagtgaatcctanaataacaccnccacccccaancancccaagggtggcaccgcccacagtgaactgggcactctcccatcaactgtcaatcaagaaaatccatcacaatcttgcctgccgatcagtctggagggggcatttcctgggtttaggttccctcatcctaaatgacttaagcttgtgtcaaattgacataaaactagccagcatgcctgata

SEQ ID NO: 115 - DNA, 696 bp, Mus musculus
  misc_feature (1)...(696): n = A,T,C or G
acagaactgtaaaaggcactggacagacttgacgcatgcagaatcatattcaaattgttggtgcccaagaaagtgaagaagttatactgtaaaaccataaacatcactgaaagaaatgaaaacacttatagatgagaagatgccctgtgctctccagcaggaaacttcaacagtgtttagaccagtggccctcaacctgtaggtcacaactccctgggtctcctatcagatatgctggatatcagatatttacactatgaatcatttggggttggtttgtttgtttgttttggtttttccaanacagtgtttctctgtgtagctctggctgtcctggaactcactgtgtagaccaggctggcctggaactcagaaatccacctgcctctgcctctgccttccaagtgctgggattaaagtcgtgcactaccacgcctggctttacattatgaatcataacagtcacaaaatcntagtgatgaagtagcaatgaaataattttatatttgggggtcaccaccacatcattagganctgtgttaaaagggccacagcattaggaaagcccnnaaccagtgggtttaaatgctaatgttaccgaaaganatgacagattcngccaacacctaccagaaacccancanatgttttttggcanaatgcaaaacctcttaatgctgtgataaatgtccactc

SEQ ID NO: 116 - DNA, 269 bp, Mus musculus
  misc_feature (1)...(269): n = A,T,C or G
acctgaacagttgattcagacttgactcgctgccgctgancatgagaccacctggggtggaccttccgacctaaccggctctattgttctgtcacctgctgctgctcgtctccaagacactgctacctgctgaaagcccttganataatctggagacagcatccagccgatcacctactggctggcgaaaggcancaaaaatggattgtttggggggggcnggggaagaatngtnggatngggatnggcnggccctctttattaattcc

SEQ ID NO: 117 - DNA, 292 bp, Mus musculus
cgcaacacaccttgaacaacagcaacaaccaacaacccaccccatcactcgggacctagcatttatagaccctctggaaagtcctcaaattccaaatgtcacacaattgcagaaaactatctgcagttggcaaaaaacgtgcctctgctagagcactaagcaaatcagagtcagctgctgtggacagaatgaagcagccccatatcccatacgtgggattaaacaaaaatatattcttataatatttctgtggtttataaataaaccaaaatttcaaaattgtcaaaaaaaa

SEQ ID NO: 118 - DNA, 374 bp, Mus musculus
  misc_feature (1)...(374): n = A,T,C or G
acgggattcctgtgaacaganagggcatcanccacccacaaaactcacccaaaatgtgtctgcctacaacatacggaggattaagatggagcananattgaggggacngncaaccagtgactgcctaactcgagacccatcccatgggagagagccaacccctgccactattgacactcggctatgcttgcagacagtgtgactccttgacaacagtgtgcctcgttatggttttatgaaaccagttaacagtcttcctccaaggtctctgcttcagtccctgcctccangaaatgccctgcttgtgtttctgctctgacttcccccagtgatggaatgtnaccatggaagataaaataaatctttcccacatc

SEQ ID NO: 119 - DNA, 230 bp, Mus musculus
gtatattatacataagacacttgtagctgtcttcagatgcaccagaagagggcgtcagatctcattacggatggttgtgagtcacatgtggttgctcggatttgaactcaggaccttcggaagaacagtccgtgctcttaccctctgagccatctcaccagccctgatctccattgtatgtgcatgcacatgtaaataaacataataaaacatcgtaagtcttgaaaaaa

SEQ ID NO: 120 - DNA, 314 bp, Mus musculus
  misc_feature (1)...(314): n = A,T,C or G
catccaccacccctggaagcaggttgattcagacttgacctcgctgccgctgagcatgagaccacctggggtggagccttccgacctagccggctctattgttctgtcacctgctgctgctcgtctccaagacactgctacctgctgaaaggcccttgagataatctggagacagcatccagccgatcacctactggctggcgaanggcaccaagaatggattgtttggggggggcgggggangaatggtgggatggggatgggcggcccctctttataagtacagactcttaataaactttggggccttgaac

SEQ ID NO: 121 - DNA, 233 bp, Mus musculus
tattatacataagacatgtagctgtcttcagatgcaccagaagaaggcgtcagatctcattacggatggttgtgagtcaccatgtggttgctcggatttgaactcaggaccttcggaagaacagtccgtgctcttaccctctgagccatctcaccagccctgatctccattgtatgtgcatgcacatgtaaataaacataataaaacatcgtaagtcttgaaaaaaaaaacta

SEQ ID NO: 122 - DNA, 289 bp, Mus musculus
cctgaacagttgatcaaattgactcgctgccctgacatgagacactggggtggaccttccgacctaccggctctattgttctgtcacctgctgctgctcgtctccaagacctgctacctgctgaaagcccttgagataatctggagacagcatccagccgatcacctactggctggcgaagggcaccaagaatggattgtttggggggggcgggggaagaatggtgggatggggatgggcggcccctctttataagtacagactcttagtaaactttggggccttgaac

SEQ ID NO: 123 - DNA, 282 bp, Mus musculus
acaattaccctcgctgactgaacactgggtgactccgactaccggctctatttctgtcactgctgctgctcgtctccaagacctgctacctgctgaaagcccttgaaaataatctgggagacagcatccagcccgatcacctactggctggcgaaagggcaccaagaaatgggattgtttggggggggggcggggggaaggaatggtggggatgggggatggggcggcccctctttataaagttacagactcttaattaaacttttgggggcctttgaaacc

SEQ ID NO: 124 - DNA, 307 bp, Mus musculus
  misc_feature (1)...(307): n = A,T,C or G
agtactctctttcaccngagctgccatctcagttgaacattcctctcgagctgctggttggcccgcaacaagtccagcctattgtgggtgatgccacccctgggttggtggccctggattctataagaaagctggctgagaaagccatgggaagcaagccagtaagcagcacccctccatggcctctgtatcagctcatacctccaggttccagccccgattgaattcctgtcctgacttcctccaatgatggattatgatctggaaatcctagccaaataaacacttttctccccaaaaaaaaaaa

SEQ ID NO: 125 - DNA, 312 bp, Mus musculus
  misc_feature (1)...(312): n = A,T,C or G
cccgaaccgttgatcacacttgactcgctgccgctgaacatgagacacctggggtggagccttccgacctagccggctctattgttctgtcacctgctgctgctcgtctccnagacactgctacctgctgaaaggcccttgtanataatctgganacagcatccagccgatcacctactggctggcgaagggcaccaagaaatggattgtttggggggggcgggggaagaatggtgggatggggatgggcggcccctctttataantacagactcttagtaaactttggggccttgaactgaaaaaaaaaaa

SEQ ID NO: 126 - DNA, 362 bp, Mus musculus
caggaatcctgaaactgacgagattcactaagccctccctggaagagtaagcaataaaagctgagagagcaggaagctgagctgcaaagaagactcttaagaaagagcaaagctgcaaagaatggactgcctggaagacacttagaccagagtcacttggaaaggatgctctccagcctgttgagttgcctgcaggctgtgcagtatgctccagattcccagctttgtgagctgtcatcaatactggggagagctttggtgatgcagctgtctgagtcgttgttgctcctataggtcaccctttacctcttctcctgtaagtaactccattaaagctcattggttcaccctaaaaaaaaaaa

SEQ ID NO: 127 - DNA, 302 bp, Mus musculus
  misc_feature (1)...(302): n = A,T,C or G
cctggaagcaggttgattcagacttgacctcgctgccgctgagcatgagaccacctggggtggaccttccgacctagccggctctattgttctgtcacctgctgctgctcgtctccaagacactgctacctgctgaaaggcccttgagataatctggagacagcatccagccgatcacctactggctggcgaagggcaccaagaatggattgtttggggggggcgggggangaatggtgggatggggatgggcggcccctctttataantacagactcttagtaaactttggggccttgaac

SEQ ID NO: 128 - DNA, 320 bp, Mus musculus
  misc_feature (1)...(320): n = A,T,C or G
agatggcatctcaactagcctggacccggggtctctcagacactgaagtcactagccaggcagcatacaccagctgataagagcccctgacacatatacagcagaggactgccgggtctggactcaaccagagaagaacgcctaacccttgagagacttggggccccagggagtggggaggtctggtaagggcatcngcttggagctgggggcggggggaggaatgggatgtggagtggtgggggtggaccncaaggggatggagtctggactgtnnaaaaggattaaaaagtanataaataaataggaaacaaaaaaaa

SEQ ID NO: 129 - DNA, 302 bp, Mus musculus
ctccccagcctgaacagttgatcagattgactcgctgccgctgagcatgagacacctggggtggaccttccgacctagccggctctattgttctgtcacctgctgctgctcgtctccaagacactgctacctgctgaaagcccttgagataatctggagacagcatccagccgatcacctactggctggcgaagggcaccaagaatggattgtttggggggggcgggggaagaatggtgggatggggatgggcggcccctctttataagtacagactcttagtaaactttggggccttgaac

SEQ ID NO: 130 - DNA, 271 bp, Mus musculus
  misc_feature (1)...(271): n = A,T,C or G
gtgtctcggacaagttctctgtgtattctgggctgtcctanaatcagagaccacctacctctgattcaaagggactaggattaaatgcccggttaaagaagatactccagggctggagagatggctcagtgggttcagatcacagactgctcgtccagaagtcctgagttcaattcccagcaaccacaaggtggctcacaacacctcttctggtgtgtctaaagacagcaacagtgtattcatgtacattaaatgaataaataaattgtac

SEQ ID NO: 131 - DNA, 154 bp, Mus musculus
tacacctggatggacttgccgctcaatcgttctgccacgcccactgctggacctgccgctttcctgttccgaagccatcacgtggtcacctgctactggattccaagattatttggcgtgaatcgggcccccttcccctgcttcataactgcat

SEQ ID NO: 132 - DNA, 303 bp, Mus musculus
  misc_feature (1)...(303): n = A,T,C or G
ccagccctggaacaggttgatcagacttgactcgctgccgctgaacatganaccacctggggtggaccttccgacctaaccggctctattgttctgtcacctgctgctgctcgtctccaagacactgctacctgctgaaagcccttgagataatctggagacagcatccagccgatcacctactggctggcgaagggcaccaagaatggattgtttggggggggcgggggaagaatggtgggatggggatgggcggcccctctttataantncagactcttagtaaactttggggccttgaac

SEQ ID NO: 133 - DNA, 267 bp, Mus musculus
  misc_feature (1)...(267): n = A,T,C or G
ggagcatgagacaacctggggtgtagctttctgacctaacnggctctattgttctgtcanctgctgctgctcgtctccaagacactgctacctgctgaaaggccttgagataatctggagacagcatccagccgatcacctactggctggngaanggcaccaagaaatggattgtttggggggggcgggggangaatggtnggatggggatgggcggnccctctttatgagtacagactcttagtanactttggggccttgaacaga

SEQ ID NO: 134 - DNA, 230 bp, Mus musculus
tttgctgtgtgtatatatgtacacgtatgtacaccatgtcatgaagcctccatggtcgtgagaggatttggatcccttggaactggcgttacattggtcgtgagcctccatgttggcgctgagaaacaaacctgggttctctggaagcgcagcaagtgctcttaaccatcgagccatctctccatctcaaaccacccatgtatataaaatgaaaatacataaaccataaa

SEQ ID NO: 135 - DNA, 294 bp, Mus musculus
  misc_feature (1)...(294): n = A,T,C or G
cagttgattcagacttgactcgctgccgctgaagcatgagaccacctggggtggagccttccgacctagccggctctattgttctgtcacctgctgctgctcgtctccaagacactgctacctgctgaaaggcccttgagataatctggagacagcatccagccgatcacctactggctggcgaanggcaccaagaatggattgtttggggggggcgggggangaatggtgggatggggatgggcggcccctctttataagtacanactcttagtaaactttggggccttgaac

SEQ ID NO: 136 - DNA, 551 bp, Mus musculus
  misc_feature (1)...(551): n = A,T,C or G
atggctcaatgggtaanacaccgactgctcttctnaatgttcggacttcanatcccagaaacnacatagtggctnacanccatccgtnatgagatctggcgccttcttctggagtgtctgancacanctacaatgtncttnnanttnatncntnanttcttctgactaaatntaaaaaatnaatgtcctggagancctccgtgtaccntcccccnaccttggatttactgattntnacctttgttgccactgtgaatganaccncctggggtggagccttcctacctagatggttctattgctctgtcacctgcaatgctcttctccaagacaccactacccgctgaagaggctgaacctgtntcctgagatattcctgtgatagccgacnaccagtggacttggcgacctaataatgctaacagctctggcagactagtgctaacaacttggcaacaaagcatcnagaaancctggtgtggcaggggatgggcctccccccctttataanccacngaccttagtagactttggggccttgaccgaaggag

SEQ ID NO: 137 - DNA, 331 bp, Mus musculus
  misc_feature (1)...(331): n = A,T,C or G
ttctgtcctacattcangatcncactcaggaggtcaagcatanacagcaaacagttttacctgaaganctatctgccccccttgttttgttttggttttttgttgttgttgttgttttttaanacagagatgggggttgggggggctggtgaaatggctcattgggtaagancacccaactactcttccaggctgctcttccgaaggtccggaattcaaattccagcaaccacatggtggctcacaaccatccgtaacaagatctgacgccctcttctggaatgtctgaagacagctacagtgtacttacatataaataaataaatcttta

SEQ ID NO: 138 - DNA, 236 bp, Mus musculus
gctgtgtgtatatatgtacacgtatgtacaccatgtcatgaagcctccatgggtcgtgagaagatttgggatcccttggaactggcgttacattggtcgtgagcctccatgttggcgctgagaagcaaacctgggttctctggaagcgcagcaagtgctcttaaccatcgagccatctctccatctcaaaccacccatgtatataaaatgaaaatacataaaccataaaaaaaaaa

SEQ ID NO: 139 - DNA, 463 bp, Mus musculus
gcacttgaagtccttgtaaaagaagagaaacaacactacaaaaaagcagatgggaaaagataatacaaatgaggtaaggactggaaccaatgaaacagaaatgaagagaagaaaatatacaaagaatcaaacaaaattggttctttgaaaagattaacaagattgacaagtctttagctgaaaccttcccccaatatgaagcaggctgagccagaccttgactttgctgccactaagaagatcacctagggtggagcctgcctccctagatcactctattgttcagccactgtcgctgctacctgctgggagtctgcctagctattccggagactacaccctatcctgcaagtgatcacctgcagctgggcttcaaggatgaattggctggaatgggcctcccccgctcctttataaagtgcatccgccattaaacatttgaaccttgagcagaaaaaaaaaa

SEQ ID NO: 140 - DNA, 445 bp, Mus musculus
  misc_feature (1)...(445): n = A,T,C or G
ggtgagaggtcacattaaaagcatgactgccttctgaaatctgagttcaaatcccagcaagcacatggtggctcacaaccatctgtaatgagatctgacacactcttgtggtgtgtctgaagacagctacactgtacttanttgtaatcataaataaatcctgggccggccggagctagtggagtgtaccagagcgagcagaagtcctaaattcaattcccagcaagctgatgaaagcttcggtacagctacagtatgtactcatctacataaaataaatgattaaattcttaanataaataaataaatctgatcctattatgttaatntgctactacagcttaaacttctaatgttctctcnaacttaagtggcctattgggaataaatactttggcncagantngtctccgttgggtaagctatgttctccaatccggtccat

SEQ ID NO: 141 - DNA, 354 bp, Mus musculus
  misc_feature (1)...(354): n = A,T,C or G
gaagactaagacgaagacnaccaagaagaaagaagaagaagaanaagaagaagaagaactaacactatcatttgcaggcctactaccaggcnaaggtcttttatccttaccttggctgccttgccttgaaccattgtcacatcagctacaggtagttggtagaatggccaagcctgtttactaanaagcaagactantangaggaacaacactatgaactaaccagtaccncccccnccccccagagctgtgttgcntatgtaacanaggatggcctantcanccatcaatgaaaagagaggccctcngtcttgcaaanatcatatgccccnntacaggggaatgcctgggcca

SEQ ID NO: 142 - DNA, 239 bp, Mus musculus
  misc_feature (1)...(239): n = A,T,C or G
aacatgttgatcagacttgactcgctnccgctgacatgagacacctngggtggaccttccgacctanccngctctattgttctgtcacctgctgctgctcgtctccnanacactgctacctgctnaaagcccttgaagatnatctggagacagcatccagcccatcacctactggctggcgaanggcaccaataatggattgtttggggggggcnggggaagaatggtgggatggggag

SEQ ID NO: 143 - DNA, 317 bp, Mus musculus
  misc_feature (1)...(317): n = A,T,C or G
tccccagacctcaatcaggtngattcatgantangacctcactnccgnnttancannanaccncctggggtggaccttctgacntngcctggctctcttgttgctgtcaactgctcctgctcgtctccaaaacnctgctacctnctcaaacgcccttcacatnntctgganacancatccntccnatcacctactggctggcgaanggcaccaanaatggattgtttggggggggcnggggaagaatggtgggatggggagggcggcccctctttataantacagactcttagtaaactttggggccttgaacagaa

SEQ ID NO: 144 - DNA, 321 bp, Mus musculus
gaatccaccatcatggatcaaaccatggattcccagcataggtcaggctcccaaaccctgactcttcgtgaaacaaaggcgaaaccaaagtatagtctcccctcccccagcctgaaacctgcttgctcaggggtggagcttcccgctcaatcgttctgccacgcccactgctggagcctgtcgctttcctgttccgaagccatcacgtggtcaccctgctactggatgccgagattatttggcgggaatcgggcccccttcctctctgcttcataactgcttgcggaacaataaaattgagctttgatcagaaaaaaaaaa

SEQ ID NO: 145 - DNA, 231 bp, Mus musculus
gtgttttgcctgtgtgtatatatgtacacgtatgtacaccatgtcatgagcctccatggtcgtgagaggactttggatcccttggaactggcgttacattggtcgtgagcctccatgttggcgctgagaagcaaacctgggttctctggaagcgcagcaagtgctcttaaccatcgagccatctctccatctcaaaccacccatgtatataaaatgaaaatacataaacca

SEQ ID NO: 146 - DNA, 182 bp, Mus musculus
ggacggagggttccagactgccctttgggattcaaacgggagccgctttggactgactggctgccttcctcctcctccccctcctcccccttctgcttcagatttatttattatatgtaagtacactgtagcagttgtaggacacactagacgagggcaccagatctcattgtgggtggttg

SEQ ID NO: 147 - DNA, 316 bp, Mus musculus
  misc_feature (1)...(316): n = A,T,C or G
agacccctctcttaggtttagaaatcgctggaataccnaagagcaacgcttcctctggtgggcagctgattcttatctgtacatgggacagggcgggggggcagggggggggnagnctctatcgacctntnacgngctgntnanatacaggacactgcaanntgcatganaggccctgtagatattccggagacagcaacccgcagatcacctactggcaggcaacaggcatcaacaatggattggcggggggatgggcctcccccctttataagcacagactcttagtaaacttgggggccttgaaaaaaaaaaa

SEQ ID NO: 148 - DNA, 217 bp, Mus musculus
gacttgacctcgctgccgctgagcatgagacccctggggtggagccttccgacctagccggctctattgttctgtcacctgctgctgctcgtctccaagacactgctacctgctgaaaggcccttgagataatctggagacagcatccagccgatcacctactggctggcgaagggcaccaagaatggattgtttggggggggcgggggaggaatgg

SEQ ID NO: 149 - DNA, 308 bp, Mus musculus
  misc_feature (1)...(308): n = A,T,C or G
gccctgaagcaggttgattcagacttgacctcgctgccgctgagcatgagaccacctggggtggagccttccgacctagccggctctattgttctgtcacctgntgctgctcgtctccaagacactgctacctgctgaaaggcccttgagataatctggagacagcatccagccgatcacctactggctggcgaagggcaccaagaatggattgtttggggggggcgngngaggaanggtgggatggggatgggcggcccctctttataagtncagactcttagtaaactttggggccttgaacagaa

SEQ ID NO: 150 - DNA, 370 bp, Mus musculus
  misc_feature (1)...(370): n = A,T,C or G
acgagagaggggcatcaacccacccacaaaaccttcnncccagattgtgntctgcctacacgatacacaggnnttacnatggngcaganatatgaggggacggtcaaccagtgantgcntanctnnagancnatnccatgggagagagccancccntgncactattgacactcggctatgcttgcagacagtgtgactccttgacaacagtgtgcctcgttatggttttatgaaaccagttaacagtcttcctccaaggtctctgcttcagtccctgcctccaggaaatgccctgcttgtgtttctgctctgacttcccccagtgatggaatgttaccatggaagataaaataaatcttttcccacatca

SEQ ID NO: 151 - DNA, 137 bp, Mus musculus
  misc_feature (1)...(137): n = A,T,C or G
tacatactagggcccttgntgctaccacttctgagcatctggangtctctgcagntgttggggtactactagtgtgtctgaagacagctacagtgtactcatatcaaatatataaatatttaggggaaaaaaaaaaa

SEQ ID NO: 152 - DNA, 320 bp, Mus musculus
aagcctcccccagccctgaagcaggttgattcagacttgacctcgctgccgctgagcatgagaccacctggggtggagccttccgacctagccggctctattgttctgtcacctgctgctgctcgtctccaagacactgctacctgctgaaaggcccttgagataatctggagacagcatccagccgatcacctactggctggcgaagggcaccaagaatggattgtttggggggggcgggggaggaatggtgggatggggatgggcggcccctctttataagtacagactcttagtaaactttggggccttgaacagaa

SEQ ID NO: 153 - DNA, 141 bp, Mus musculus
  misc_feature (1)...(141): n = A,T,C or G
atgggaagatggaagtagagaatcaactgcatgaagtcctgtgctgtcctnacgtgtgctatggctcacatacacgcgcacgcgcgcacacacacacacacacacacagagataataaaatgaatattaaaaaaggaaaaa

SEQ ID NO: 154 - DNA, 100 bp, Mus musculus
  misc_feature (1)...(100): n = A,T,C or G
ggttagtctcgaaattcgatatcaagctgatccggaacccttaatataacttcggataatgtatgctatacgaagttatnangnccctcgaaaaaaaaaa

SEQ ID NO: 155 - DNA, 217 bp, Mus musculus
  misc_feature (1)...(217): n = A,T,C or G
cctgaagcaggttgattcanacttgacctcgctgccgctgagcatganaccacctggggtggagccttccgacctaaccggctctattgntctgtcacctgctgctgctcgtntccaagacactgntacctgctgaaaggcccttgagataatctggagacagcatncanccgatcacctactggctggcgaagggcaccaagaatggattgtttgg

SEQ ID NO: 156 - DNA, 254 bp, Mus musculus
  misc_feature (1)...(254): n = A,T,C or G
atgaccctcttagacacgaagcaggttgattcagacttgacctcgctgccgctgagcatgagaccacctggggtggagccttccgacctanccggctctattgntctgtcacctgctgctgctcgtctccaagacactgctacctgctgaaaggcccttgagataatctggagacagcatccanccgatcacctactggctggcgaagggcaccaagaatggattgtttggggggggcgggggaggaatggtgg

SEQ ID NO: 157 - DNA, 384 bp, Mus musculus
  misc_feature (1)...(384): n = A,T,C or G
ggtcacctactgtaaccagacaggacttcctgtgaagagagaggggcatcaacccacccacaaaaccttcaacccaaaatgtgttctgcctacaagatacacagggataaagatggagcagagattgaggggacggccaaccagtgactgcctaactcgagacccatcccatgggagagagccaacccctgccactattgacactcggctatgcttgcagacagtgtgactccttgacaacagtgtgcctcgttatggttttatgaaaccagttaacagtcttcctccaaggtctctgcttcagtccctgcctncangaaatgccctgcttgtgtttctgctctgacttcccccagtgattggaatgttaccatggaagataac

SEQ ID NO: 158 - DNA, 412 bp, Mus musculus
tggtcacctactgtaaccagacaggacttcctgtgaagagagaggggcatcaacccacccacaaaaccttcaacccaaaatgtgttctgcctacaagatacacagggataaagatggagcagagattgaggggacggccaaccagtgactgcctaactcgagacccatcccatgggagagagccaacccctgccactattgacactcggctatgcttgcagacagtgtgactccttgacaacagtgtgcctcgttatggttttatgaaaccagttaacagtcttcctccaaggtctctgcttcagtccctgcctccaggaaatgccctgcttgtgtttctgctctgacttcccccagtgatggaatgttaccatggaagataaaataaatctttcccacatcaaaaaaaaaa

SEQ ID NO: 159 - DNA, 230 bp, Mus musculus
agatgctgcactgggtcaggcaaccacatcaaatgtccagacaagaacaaaaatgggggctggagaggtggctcagtggtgaagagcactgcctgttcttccagaggtcctgagttcaattcccaggagccacatggaggctcacatcccatccatctgtagtaaggtctgatgcctgcaggtatccatgcagatagagcacccatatacattagataaataaaaaataa

SEQ ID NO: 160 - DNA, 319 bp, Mus musculus
agcctcccccagccctgaagcaggttgattcagacttgacctcgctgccgctgagcatgagaccacctggggtggagccttccgacctagccggctctattgttctgtcacctgctgctgctcgtctccaagacactgctacctgctgaaaggcccttgagataatctggagacagcatccagccgatcacctactggctggcgaagggcaccaagaatggattgtttggggggggcgggggaggaatggtgggatggggatgggcggcccctctttataagtacagactcttagtaaactttggggccttgaacagaa

SEQ ID NO: 161 - DNA, 204 bp, Mus musculus
gtagctctggctgtcttggaactcattctgcagaccagtctggcctggaatttctcagagatctgcctaccgctgcctcccaagtgttgggactaaagtcttgtgccaccatcctggctttatcttgtcgttttaattatggctatcctagtagctgtgaagtagtatatacagcattaaaaaaatttttttaaaagaaaaaaa

SEQ ID NO: 162 - DNA, 416 bp, Mus musculus
agactggtcacctactgtaaccagacaggacttcctgtgaagagagaggggcatcaacccacccacaaaaccttcaacccaaaatgtgttctgcctacaagatacacagggataaagatggagcagagattgaggggacggccaaccagtgactgcctaactcgagacccatcccatgggagagagccaacccctgccactattgacactcggctatgcttgcagacagtgtgactccttgacaacagtgtgcctcgttatggttttatgaaaccagttaacagtcttcctccaaggtctctgcttcagtccctgcctccaggaaatgccctgcttgtgtttctgctctgacttcccccagtgatggaatgttaccatggaagataaaataaatctttcccacatcaaaaaaaaaa

SEQ ID NO: 163 - DNA, 396 bp, Mus musculus
ccttggattgacgcaggactctcactgaacctggaaccaggctgccgtgtccagcaagcctcacccatcgcctttctccatctgtcccccaaccccccacagcactgtgcaagcgtgtgcagccgtacctggctttttctgtggacgctggaatctgaacccagcatcctttgcatgcacagctgtagtctcccctctcctagcctgaaacctgcttgctcaaggggtggagcttcctgctcattcgttctgccacgcccactgctggaacctgcggagccacacacgtgcacctttctactggaccagagattattcggcgggaatcgggtcccctcccccttccttcataactagtgtcgcaacaataaaatttgagccttgatcaagaaaaaa

SEQ ID NO: 164 - DNA, 222 bp, Mus musculus
  misc_feature (1)...(222): n = A,T,C or G
gctgtgtgtatatatgtacacgtatgtacacnatgtcatgagcctcctggtcgtgagaggactttggatcccttggaactggcgttacattggtcgtgagcctccatgttggcgctgagaagcaaacctgggttctctggaagcgcagcaagtgctcttaaccatcgagccatctctccatctcaaaccacccatgtatataaaatgaaaatacataaacca

SEQ ID NO: 165 - DNA, 208 bp, Mus musculus
gataaagaaaccgccgccaaggttgacatcaagatagcctggaactgatggttgtgagctgtcacatggagaatcgaaattgaacctgggtcctctggaagggcaaccaatatccttaactgctgagctatttctccagccccttccaccatcggttctcttggcagagaaaacaagagaaaaaggacactatggaaaaataaagaaa

SEQ ID NO: 166 - DNA, 179 bp, Mus musculus
ggggcctgtggggagaagagaaggtttcaccatgtatccctccctggctgggctggaactcactatgtagaccagaccagactccagctcattctgcctctacttcccaaatgctgatattaaaggcatgtgccgtcactccccgcaaaaaacttttctattttaattgaggtatattt

SEQ ID NO: 167 - DNA, 394 bp, Mus musculus
  misc_feature (1)...(394): n = A,T,C or G
gacaggacttcctgtgangagagaggggcatnaacccacccacaaaaccttcaacccaaaatgtgttctgcctacaagatacacagggataaagatggagcagagattgaggggacggccaaccagtgactgcctaactcgagacccatcccatgggagagagccaacccctgccactattgacactcggctatgcttgcanacagtgtgactccttgacaacagtgtgcctcgttatggttttatgaaaccagttaacagtcttcctccaaggtctctgcttcagtccctgcctccaggaaatgccctgcttgngtttctgctctgacttnccccagtgatggaatggttccnttggaagataaaataaatctttcccacatcaaaaaaaaaa

SEQ ID NO: 168 - DNA, 239 bp, Mus musculus
gtcgttttgcctgtgtgtatatatgtacacgtatgtacaccatgtcatgagcctccatggtcgtgagaggactttggatcccttggaactggcgttacattggtcgtgagcctccatgttggcgctgagaagcaaacctgggttctctggaagcgcagcaagtgctcttaaccatcgagccatctctccatctcaaaccacccatgtatataaaatgaaaatacataaaccaaaaaaaa

SEQ ID NO: 169 - DNA, 338 bp, Mus musculus
  misc_feature (1)...(338): n = A,T,C or G
gtgaatgagagaggggcatcaacccaccccaaaaccttcaacccaaaatgtgttctgcctacaagatacacaagggataaagatggagcangagattgaggggacggccaaccagtgactgcctaactcgagacccatcccatgggagagagccaacccctgccactatngacactcggctatgcttgcagacagtgtgactccttgacaacagtgtgcctcgttatggttttatgaaaccagttaacagtcttcctccaaggtctctgcttcagtccctgcctccaggaaatgccctgcttgtgtntctgctctgacttnccccagagatggaatgt

SEQ ID NO: 170 - DNA, 416 bp, Mus musculus; identical to SEQ ID NO: 162

SEQ ID NO: 171 - DNA, 319 bp, Mus musculus
  misc_feature (1)...(319): n = A,T,C or G
gcctcccccagccctgaagcaggttgattcagacttgacctcgctgccgctgagcatgagaccacctggggtggagccttccgacctagccggctctattgttctgtcacctgctgctgctcgtctccaagacactgctacctgctgaaaggcccttgagataatctggagacagcatccagccgatcacctactggctggcgaagggcaccaagaatggattgtttggggggggcgggggaggaatggtgggatggggatggncggcccctctttataagnacngactcttagtanactttggggccttgaacagaaa

SEQ ID NO: 172 - DNA, 335 bp, Mus musculus
gcattaactgtggctggcttacagtttcagaggtttagttcgttattaccatggttggtgctggagaagtggctgagaggtctacatctgaatccacaagcatcaggaagaaagagtgaccgtgaacctggcttggatttttgatgcctcaaaacccaccccccaatgacacagtttctccaacaaggcctccaatgacacctactgcaacaaatagtgccattctctaaacactcaaatatatgagcctatgggaccgttcttactcaacccccacatatatgtatatgcacctatgttcccaaatataatctcttccactcataaaaaaaaaa

SEQ ID NO: 173 - DNA, 308 bp, Mus musculus
  misc_feature (1)...(308): n = A,T,C or G
ctcccccagccctgaagcaggttgattcaggacttgacctcgctgccgctgagcatgagaccacctggggtggagccttccgacctagccggctctattgttctgtcacctgctgctgctcgtctccaagacactgctacctgctgaaaggcccttgagataatctggagacagcatccagccgatcacctactggctggcgaagggcaccaagaatggattgtttggggggggcgggggaggaatggtgggatggggatgggcggcccctctttataagtncngactcttagtaaactttggggcct

SEQ ID NO: 174 - DNA, 235 bp, Mus musculus
  misc_feature (1)...(235): n = A,T,C or G
attattatacataagaacactgtanctgtcttnanatgcaccagaagagggcgtcagatntnattacggatggttgtgagtnaccatgnggntgctcgnattngaactcanganctttggaagaacagntcgagctcttaccctctgagccatctcaccagccctgatctccattgtatgtgcatgcacatgtaaataaacataataaaacatcgtaagtcttgaaaaaaaaaaa

SEQ ID NO: 175 - DNA, 273 bp, Mus musculus
  misc_feature (1)...(273): n = A,T,C or G
tgagcatgagaccacntggagtggagccttncgacctanccggctctattgnnctgtcacctgctgntgctcgtctccaagacactgctacctgctgaaaggcccttgagataatctggagacagcatccagccgatcacctactggctggcgaagggcaccaagaatggattgtttggggggggcgggggaggaatggtgggatggggatgggcggcccctctttataagtacagactcttagtaaactttggggccttgaacagaaaaaaa

SEQ ID NO: 176 - DNA, 244 bp, Mus musculus
  misc_feature (1)...(244): n = A,T,C or G
tatataaacagtaagaactgctgaggagaacatgactaggcctgctgcctggaagagactcacnacctgcctgaaggagagattctctgtcctgttgagctctccacaagtagtgtaatgaactccagggttcctgctcttggtgatgtanctatatttgagttgaccctgcccctgcccttgcccttttacttatattcttgtgaataactctaataaactcattggattaccaaaaaaaaaa

SEQ ID NO: 177 - DNA, 248 bp, Mus musculus
ggggcctgtggggagaagagaaggtttcaccatgtatccctccctggctgggctggaactcactatgtagaccagaccagactccagctcattctgcctctacttcccaaatgctgatattaaaggcatgtgccgtcactccccgcaaaaaacttttctattttaattgaggtatatttcacaaacaaaaaatgtaaaccttcaagatctataataaaaattaaacaaacacttcatcaaaaaaaaaa

SEQ ID NO: 178 - DNA, 300 bp, Mus musculus
  misc_feature (1)...(300): n = A,T,C or G
tgattcagacttgacctcnctgncgctgagcatganaccacctggggtggagccttccgacctagccggctctattgttctgtcacctgctgctgctcgtctccaagacactgctacctgctgaaaggcccttgagataatctggagacagcatccagccgatcacctactggctggcgaagggcaccaagaatggattgtttggggggggcgggggaggaatggtgggatggggatgggcggcccctctttataagtacagactcttagtaaactttggggccttgaacagaaaaaaaa

SEQ ID NO: 179 - DNA, 284 bp, Mus musculus
acctaggaagcctgactgccttgaactcctggatacccaaggatggcactgaacttctcatccttctaattcccaagtgttaagatttcaggtatgggctggtgagatggctcagtgggtaagagcgcccgactgctcttccgaaggtctgaagttcaaatcccagcaaccacatggtggctcacaaccatctgtaacaagatctgacgccctcttctggagtgtctgaagacagctacagtgtacttacatataataaataaataaatctttaaaaaaaaaaa

SEQ ID NO: 180 - DNA, 316 bp, Mus musculus
cagatgttacatttaggaagcctgtctcacatccctaggactatcccactgtcactgcctcagaagcctggtctccagagtcgactggtgtagtcccccctccctcagcctgaaacctgcttgctcaggggtggagcttcccgctcaatcgttctgccacgcccactgctggaatctgccgctttgctgttcggagccgtgcacgaggtcacccagctattggattccaagattaattggcgggaatcgggccccttcccctgcttcataactgcgtgcggaacagtaaaattgagctttgatcagaaaaaaaaaa

SEQ ID NO: 181 - DNA, 318 bp, Mus musculus
gcctcccccagccctgaagcaggttgattcagacttgacctcgctgccgctgagcatgagaccacctggggtggagccttccgacctagccggctctattgttctgtcacctgctgctgctcgtctccaagacactgctacctgctgaaaggcccttgagataatctggagacagcatccagccgatcacctactggctggcgaagggcaccaagaatggattgtttggggggggcgggggaggaatggtgggatggggatgggcggcccctctttataagtacagactcttagtaaactttggggccttgaacagaa

SEQ ID NO: 182 - DNA, 369 bp, Mus musculus
  misc_feature (1)...(369): n = A,T,C or G
gactggtcacctactgnagcccgacnggacttnctgtgatgagagaggggcatnaacccacccacaaaaccttcancccaaaatgtgttctgcctacaagatacggcagggatnaagatggagcanagattgaggggacggccaaccngngactgnctaactcgagacccntnccatgggagagagccnacccctgccactattgacactcggctatgcttgnagacagtgtgactccttgacaacagtgtgcctcgttatggttttatgaaaccagttaacagtcttcctccaaggtctctgcttcagtccctgcctccaggaaatgccctgcttgtgtttctgctctgacttcccccagtgatggaa

SEQ ID NO: 183 - DNA, 163 bp, Mus musculus
  misc_feature (1)...(163): n = A,T,C or G
gctgtgcctgcctggatgctgccatgctttccaccacgangannattgactgaatnccataagctgtnnaccagcccnaatanatgtcntttataaganctancttgntaggagatcgagaganggctcancngntaagagcactgactgctcttaattctga

SEQ ID NO: 184 - DNA, 263 bp, Mus musculus
acttgacctcgctgccgctgagcatgagaccacctggggtggagccttccgacctagccggctctattgttctgtcacctgctgctgctcgtctccaagacactgctacctgctgaaaggcccttgagataatctggagacagcatccagccgatcacctactggctggcgaagggcaccaagaatggattgtttggggggggcgggggaggaatggtgggatggggatgggccgcccctctttataagtacagactcttagt

SEQ ID NO: 185 - DNA, 320 bp, Mus musculus
gcctcccccagccctgaagcaggttgattcagacttgacctcgctgccgctgagcatgagaccacctggggtggagccttccgacctagccggctctattgttctgtcacctgctgctgctcgtctccaagacactgctacctgctgaaaggcccttgagataatctggagacagcatccagccgatcacctactggctggcgaagggcaccaagaatggattgtttggggggggcgggggaggaatggtgggatggggatgggcggcccctctttataagtacagactcttagtaaactttggggccttgaacagaaaa

SEQ ID NO: 186 - DNA, 379 bp, Mus musculus
ggatcctctgcaggtgaaccacttcagagaagatatagctgctggtaaatggctttggtttccagacacaattttccaacttcacattcacagataaacaaaacagaagtgatggtttgtatatgcttggcccagggagtgacactattaggaggtgttggagtatgtgtgtcactgtgggtgtgggcttaagaccttcaccctagctgcctggaagtcagtattctgctagaagctttcagatgaagatgtagaactttcagctcctcctgcacgatgccagccagaatcccaacatgttccaccttgatgataatggactgaacctctgaacctgtaagccagccccaattaaatgttgtccttataagaaaaaaaa

SEQ ID NO: 187 - DNA, 373 bp, Mus musculus
  misc_feature (1)...(373): n = A,T,C or G
ctgtgaagagagaggggcatcancccacccacnaaaccttnaacccaaaatgtgttctgcctacaagatacacagggataaagatggagcanagattgaggggacggncaaccagtgactgcctaactcgagacccatcccatgggagagagccaacccctgccactattgacactcggctatgcttgcagacagtgtgactccttgacaacagtgtgcctcgttatggttttatgaaaccagttaacagtcttcctccaaggtctctgcttcagtccctgcctccaggaaatgccctgcttgtgtttctgctctgacttcccccagtgatggaatgttaccatggaagataaaataaatctttcccacatca

SEQ ID NO: 188 - DNA, 296 bp, Mus musculus
  misc_feature (1)...(296): n = A,T,C or G
aggttgattcagacttgacctcgctgccgctgagcatgagaccacctggggtggagccttccgacctagccggctctattgttctgtcacctgctgctgctcgtctccaagacactgctacctgctgaaaggcccttgagataatctggagacagcatccagccgatcacctactggctggcgaagggcaccaagaatggattgtttggggggggcgggggaggaatggtgggatggggatgggcggcccctctttataatgtcagactcttagtnaactttggggccttgacaga

SEQ ID NO: 189 - DNA, 187 bp, Mus musculus
ggctcagtgtatcctgttttatattttggtctttgacccgtttggacttgagttttgtgcacgaggaataagtatggatctatttggattcttctacattctgacatccagtttgaccatcaccatttgttgaagaagctgtctttttttccagtgtgtatttttggcttcgttattaaaaaaaaaa

SEQ ID NO: 190 - DNA, 345 bp, Mus musculus
  misc_feature (1)...(345): n = A,T,C or G
ccaccaatgcaccaantccagcgcatccagctntgcancgncncagncatncanncatncagcaaacnagncatccngccatccagncatnnaccaatccagccatccagccatccagcaacccagccatccagccatccagcaacccagccatccagccatccagcaatagcaaaagcagcaaatgcagcagcagggaccaacagcagggggagcagtagcccccgccccaggctctctgggagctcttgaatttataccctctcaagagtccccagaattccaaatgcaaactatctgcaggtggcaaaaatcatagttagcaagccctgtatcccaaacctg

SEQ ID NO: 191 - DNA, 296 bp, Mus musculus
  misc_feature (1)...(296): n = A,T,C or G
ctgaagcaggttgattcagacttgacctcgctgccgctgagcatgagaccacctggggtggagccttccgacctagccggctctattgttctgtcacctgctgctgctcgtctccaagacactgctacctgctgaaaggcccttgagataatctggagacagcatccagccgatcacctactggctggcgaagggcaccaagaatggattgtttggggggggcgggggaggaatggtgggatggggatgggcggcccctctntataagtactgactcttagtaaactttggggcct

SEQ ID NO: 192 - DNA, 273 bp, Mus musculus
gatacctgtagcctccctcatccctgaagcaggctgatccagactttgaccttgctgccaccgagaaggaaattacctaaggtggagctttccaacctagatggctcttttgttctgccacctgccactgctctctccaagacactgctacccgctgagaagcccctgagatattccggaggagcatcctattctgcccatcgcctacaggctggttccagacaccaagaatgggctggcgggggggggatgggccttccccttttataagta

SEQ ID NO: 193 - DNA, 285 bp, Mus musculus
  misc_feature (1)...(285): n = A,T,C or G
acacttgacctcgctgccgctgagcatgataccacctggngtggagccttccgacctanccggntctattgttctgtcacctgctgctgctcgtctccnanacactgctacctgctgaaaggcccttgagataatctggagacagcatccagccgatcacctactggctggcgaagggcaccaagaatggattgtttggggggggcgggggaggaatggtgggatggggatgggcggcccctctttataagtacagactcttantaaactttggggccttgaaca

SEQ ID NO: 194 - DNA, 415 bp, Mus musculus
gactggtcacctactgtaaccagacaggacttcctgtgaagagagaggggcatcaacccacccacaaaaccttcaacccaaaatgtgttctgcctacaagatacacagggataaagatggagcagagattgaggggacggccaaccagtgactgcctaactcgagacccatcccatgggagagagccaacccctgccactattgacactcggctatgcttgcagacagtgtgactccttgacaacagtgtgcctcgttatggttttatgaaaccagttaacagtcttcctccaaggtctctgcttcagtccctgcctccaggaaatgccctgcttgtgtttctgctctgacttcccccagtgatggaatgttaccatggaagataaaataaatctttcccacatcaaaaaaaaaa

SEQ ID NO: 195 - DNA, 126 bp, Mus musculus
  misc_feature (1)...(126): n = A,T,C or G
attggaataaccccccanatacttctaaacaggtccacatacccttgtcctttttaccacctaacccttttcaaccctacctttggatggtgggcttgaagcgtttaagaacccttattaaaagta

SEQ ID NO: 196 - DNA, 414 bp, Mus musculus
gactggtccctactgtaaccagacaggacttcctgtgaagagagaggggcatcaacccacccacaaaaccttcaacccaaaatgtgttctgcctacaagatacacagggataaagatggagcagagattgaggggacggccaaccagtgactgcctaactcgagacccatcccatgggagagagccaacccctgccactattgacactcggctatgcttgcagacagtgtgactccttgacaacagtgtgcctcgttatggttttatgaaaccagttaacagtcttcctccaaggtctctgcttcagtccctgcctccaggaaatgccctgcttgtgtttctgctctgacttcccccagtgatggaatgttaccatggaagataaaataaatctttcccacatcaaaaaaaaaa

SEQ ID NO: 197 - DNA, 249 bp, Mus musculus
gcctcccccagccctgaagcaggttgattcagacttgacctcgctgccgctgagcatgagaccacctggggtggagccttccgacctagccggctctattgttctgtcacctgctgctgctcgtctccaagacactgctacctgctgaaaggcccttgagataatctggagacagcatccagccgatcacctactggctggcgaagggcaccaagaatggattgtttggggggggcgggggaggaatgg

SEQ ID NO: 198 - DNA, 212 bp, Mus musculus
  misc_feature (1)...(212): n = A,T,C or G
ctgtataggactatgganagatggctctgcagnnaagagcactgactgctttnncanaggtnttgagttcaataccccaggcctcaggaactacatggcggcttacaaccatntgaaatggnatccaatgtnntctnntggtgtgtctgaagacagtgacagtatacagtgtacttacataaaacacacaaataaatctttaaaaaagttaa

SEQ ID NO: 199 - DNA, 214 bp, Mus musculus
  misc_feature (1)...(214): n = A,T,C or G
ggtttctctagaggactacttaaagaaggatccagcagagaagancactnantgttttcccagaggtcttgagttcaatnccccaggcctcaggaactacatggcggcttacaaccatctgnaatgggatccaatgtcctctcctggtgtgtctgaagacagtgacagtatacagtgtacttacataaaacacacaaataaatctttaaaaaag

SEQ ID NO: 200 - DNA, 285 bp, Mus musculus
  misc_feature (1)...(285): n = A,T,C or G
gaaccttgaaattgaactaaatgtatttctcattatgctatggctagggatggcccccacagactcatgtgtttgaacaaacctatgggggccagtgagtacaatgtggtggnttgaatatgcttggcccagggaagtggcactgngtgaccctgttggacnaagtgtgtcactgttggggtgggcaaagagagcttcctcctagctgcctggggatgccaagtctcttctggttgccttcaaatcaagatgcaagaactctcagntccttcttcagcattaatg

SEQ ID NO: 201 - DNA, 324 bp, Mus musculus
gcctcccccagccctgaagcaggttgattcagacttgacctcgctgccgctgagcatgagaccacctggggtggagccttccgacctagccggctctattgttctgtcacctgctgctgctcgtctccaagacactgctacctgctgaaaggcccttgagataatctggagacagcatccagccgatcacctactggctggcgaagggcaccaagaatggattgtttggggggggcgggggaggaatggtgggatggggatgggcggcccctctttataagtacagactcttagtaaactttggggccttgaacagaaaaaaaa

SEQ ID NO: 202 - DNA, 247 bp, Mus musculus
  misc_feature (1)...(247): n = A,T,C or G
ggcattgcaggagctgagagangcctgtgcgtatatatgtacacgtatgtacaccatgtcatgagcctccatggtcgtganaggactttggatcccttggaactggcgttacattggtcgtgagcctccatgttggcngctgagaagcaaacctgggttctctggaagcgcagcaagtgctcttaaccatcgagccatctctccatctcaaaccacccatgtatataaaatgaaaatacataaacca

SEQ ID NO: 203 - DNA, 324 bp, Mus musculus; identical to SEQ ID NO: 201

SEQ ID NO: 204 - DNA, 225 bp, Mus musculus
  misc_feature (1)...(225): n = A,T,C or G
ggtactggagagaggaatggctcantgattaagaagattctctgctcttccagagggctggttcaattttcagcacccaaatggnggctttccatcacccgtggcttcagttccagatctgatgcattctggcctccttgggcatnaggcatgcgcattgcatacacatatacacacaggcaaaacacataataataaacattcacttntctcagaaaaaaaaaa

SEQ ID NO: 205 - DNA, 255 bp, Mus musculus
  misc_feature (1)...(255): n = A,T,C or G
ggtggggtctttcaaccgaacatcacgtgtcctccatgagtcttgcctcagcacatacatctgtctcagctgacatcactctgccaattggtcctggtcctcggaagtgagaagaaactacagcacaccacttttggtgcatttctctctatggagtcctgatgaatgaagcgcaactgtgcattgtaaggagtatnaatnngngtgagtcattagcaaagaatccctcatcacgggtcctttcaaaaaaaaaaa

SEQ ID NO: 206 - DNA, 286 bp, Mus musculus
  misc_feature (1)...(286): n = A,T,C or G
ctcaggaagcctggactggccttgaactcactggatacccanggatggcactgaacttctcatccttctaattcccaagtgttaagatttcaggtatgggctggtgagatggctcagtgggtaagagcgcccgactgctcttccgaaggtctgaagttcaaatcccagcaaccacatggtggctcacaaccatctgtaacaagatctgacgccctcttctggagtgtctgaagacagctacagtgtacttacatataataaataaataaatctttaaaaaaaaaaa

SEQ ID NO: 207 - DNA, 322 bp, Mus musculus
ctcccccagccctgaagcaggttgattcagacttgacctcgctgccgctgagcatgagaccacctggggtggagccttccgacctagccggctctattgttctgtcacctgctgctgctcgtctccaagacactgctacctgctgaaaggcccttgagataatctggagacagcatccagccgatcacctactggctggcgaagggcaccaagaatggattgtttggggggggcgggggaggaatggtgggatggggatgggcggcccctctttataagtacagactcttagtaaactttggggccttgaacagaaaaaaaa

SEQ ID NO: 208 - DNA, 127 bp, Mus musculus
  misc_feature (1)...(127): n = A,T,C or G
acaccttttatggagcttgccagctnaatcgngctgccacacccactgctggaacctgccgntttgctgttcggagccgtactcntggtcacnctgctactagaccccaagattatttggcgggaat

SEQ ID NO: 209 - DNA, 240 bp, Mus musculus
aagcctcccccagccctgaagcaggttgattcagacttgacctcgctgccgctgagcatgagaccacctggggtggagccttccgacctagccggctctattgttctgtcacctgctgctgctcgtctccaagacactgctacctgctgaaaggcccttgagataatctggagacagcatccagccgatcacctactggctggcgaagggcaccaagaatggattgtttggggggggcgg

SEQ ID NO: 210 - DNA, 171 bp, Mus musculus
  misc_feature (1)...(171): n = A,T,C or G
acggatgggaatcgggaccctttcccctgcttnatcttngcagtgtggnacnttgcatattgggctttgatcatatccttcagtatgttctctgacctccacatgcgtcctgtaacatgggtgtatgcatacacataaacacacatccacacgttgttaaataaataaaaa

SEQ ID NO: 211 - DNA, 256 bp, Mus musculus
gatgctgccaggctatgggtgtcccaggtactgacaggaccacaccattgctgtctttaagaaacttgctgggggctggcgagatggctcagtggttaagagcatcaactgcttttccgaaggtcccgagttcaaatcccagcaaccacatggtggctcacaaccacccgtaaagaaatctgatgccttcttctggaagatctgaggacagctacagtgtacttacatataataaataaatctttaaaaaaaaaaa

SEQ ID NO: 212 - DNA, 102 bp, Mus musculus
  misc_feature (1)...(102): n = A,T,C or G
atacagtaacacacgcatactgcatntnaggagcacatgcatcgaccgcacaggaaatactcatatacataaaagacaaataaataaatctaaaaaaaaaaa

SEQ ID NO: 213 - DNA, 372 bp, Mus musculus
  misc_feature (1)...(372): n = A,T,C or G
gacaggagcccagcatagccatcatcagagaggcttcacccagcaattgatggaaagagatgcagagacccacagncaaacatgagacaaagcctgggaaagaggganaanatgaattgtangaaccacaggggtcaaaaacaccaagaaaacctgcagaatcaaccaacctgaccccatancagctcacggagactgaaccaccaaccagggagcctgcagggaaccgacctaggcctctgcacataggtaacagttgtgcagcttgctcttgttaggtgtgggactcctagcagagggagcagaggctgnctctgactcctttggctgcctgtcaagtaaatacattaatnaaaacttgtttgaaaattt

SEQ ID NO: 214 - DNA, 326 bp, Mus musculus
  misc_feature (1)...(326): n = A,T,C or G
ggtccttgccagatgttacatttaggaagcctgtctccacatccctaggactatcccactgtcactgcctcanaagcctggtctccagagtcgactggtgtagtcccccctccctcagcctgaaacctgcttgctcaggggtggagcttcccgctcaatcgttctgccacgcccactgctggaatctgccgctttgctgttcggagccgtgcacgaggtcacccagctattggattccaagattaattggcgggaatcgggccccttcccctgcttcataactgcgtgcggaacagtaaaattgagctttgatcagaaaaaaaaaa

SEQ ID NO: 215 - DNA, 235 bp, Mus musculus
tttttttacataagaacactgtagctgtcttcagatgcaccacgaagagggcgtcagatctcattacggatggttgtgagtcaccatgtggttgctcggatttgaactcaggaccttcggaagaacagtccgtgctcttaccctctgagccatctcaccagccctgatctccattgtatgtgcatgcacatgtaaataaacataataaaacatcgtaagtcttgaaaaaaaaaaa

SEQ ID NO: 216 - DNA, 233 bp, Mus musculus
ccccagccctgaagcaggttgattcagacttgacctcgctgccgctgagcatgagaccacctggggtggagccttccgacctagccggctctattgttctgtcacctgctgctgctcgtctccaagacactgctacctgctgaaaggcccttgagataatctggagacagcatccagccgatcacctactggctggcgaagggcaccaagaatggattgtttggggggggcgg

SEQ ID NO: 217 - DNA, 389 bp, Mus musculus
  misc_feature (1)...(389): n = A,T,C or G
ttgaagtccttgtaaaagaagagaaacaacactacaaaaaagcagatgggaaaagataatacaaatgaggtaaggactggaaccaatgaaacagaaatgaagagaagaaaatatacaaagaatcaaacaaaattggttctttgaaaagattaacaagattgacaagtctttagctgaaaccttcccccaatatgaagcaggctgagccagaccttgactttgctgccactaagaagatcacctagggtggagcctgcctccctagatcactctattgttcagccactgtcgctgctacctgctgggagtctgcctagctattccggagactacaccctatcctgcaagtgatcacctgcagctgggcttnaaggatgaatttgcttgaa

SEQ ID NO: 218 - DNA, 326 bp, Mus musculus
accttgtgaccgagggaaatccgtctggaatgtgaagatcgctaccttccaccaacccaagagctgagaaggttatcagacagtgccagagacagacagcagagatgtcccacgcactccggtcaagtctgcttgacaggctgagaagtctgtaagcactcacgaggaaaagagtttcaaggaaactcacctcctggagctttggcgttctcatttacccatatactcataccctatccccgtgttagtctggtgtatggaactatgagctcttttttagtattttattataaatgccttttaagattaaattctgatatagttaa

SEQ ID NO: 219 - DNA, 211 bp, Mus musculus
  misc_feature (1)...(211): n = A,T,C or G
ggcactggtggggaccggagagatgtctcagaggctaagcctctcctgtccttgntgaggacctgaattcagntgccagcagntcacaaccagctggaactccagctccgggggatctgacaccctcttntgcccttctagaactaccatattcatgtgcacacactcatatacaaatcacttaaaatacaaataaacattctactaaagg

SEQ ID NO: 220 - DNA, 309 bp, Mus musculus
gttcctctctttcagcccgagctgccatctcagttgaaccattcctctcgagctgctggttggcccgcaacaagtccagcctattgtgggtgatgccacccctgggttggtggccctggattctataagaaagctggctgagaaagccatgggaagcaagccagtaagcagcacccctccatggcctctgtatcagctcatacctccaggttccagccccgattgaattcctgtcctgacttcctccaatgatggattatgatctggaaatcctagccaaataaacacttttctccccaaaaaaaaaaa

SEQ ID NO: 221 - DNA, 302 bp, Mus musculus
  misc_feature (1)...(302): n = A,T,C or G
gggttccagactgccctttgggattcaaacgggagccgctttggactgactggctgccttcctcctcctccccctcctcccccttctgcttcagatttatttattatatgtaagtacactgtagcagttgtaggacacactagacgagggcaccagatctcattgtgggtggttganaaccanccaccatgtggttgctgggatntgaactcaggatcttcagaagancagncagggctntaaaccgctgagccntnnctccancctcctgtattccttcttaaggcattgaatgatcccag

SEQ ID NO: 222 - DNA, 238 bp, Mus musculus
gtgttttgcctgtgtgtatatatgtacacgtatgtacaccatgtcatgagcctccatggtcgtgagaggactttggatcccttggaactggcgttacattggtcgtgagcctccatgttggcgctgagaagcaaacctgggttctctggaagcgcagcaagtgctcttaaccatcgagccatctctccatctcaaaccacccatgtatataaaatgaaaatacataaaccaaaaaaaa

SEQ ID NO: 223 - DNA, 370 bp, Mus musculus
gaccctctgcagagctcccagaagccagcctgctaggatgcctctgttgcctgggtttcatgtttgacttggaacaggcttctcaagactccatgaagcagggagtttgtttatcatcatcatcatcatcatcatcaccatcactatcaccatcatcatcatcatcatcatcatcaccatcaccatcatcaccatcaccatcaacatcatcatcaccatcaccatcaccatcaccatcatcatcatcatcatcaccaacatcatgtctctaacccacaaattgcacatcgacagtaagacatggcccgcagtgagcctacaaatgttacaagactctaaacattacagaatggcattttttttttttttt

SEQ ID NO: 224 - DNA, 229 bp, Mus musculus
  misc_feature (1)...(229): n = A,T,C or G
tggcgattgctcgagtggattgnagtgcatctgctgangatttgagtntgtgctttgctaagcggacttcctcnacncccgattggaatcgcccccaaagaactgnttgtataacgaggtccacaactctgtttcctatctttccccatgacctttgctgggtggtgggctaaaagggaggttgaagcgtttaagaacccttattaaagtaggtttggaaaaaaaaaaa

SEQ ID NO: 225 - DNA, 531 bp, Mus musculus
ggtctcacagaggacactttggtctcacactgcatttacaaaactgacacctgcttcctggcctctgttccccaagtgctgggattccagtgtgcaccaccgcaccctactctttgctttgtttgaacagcaatcctgctaagggcagattaccaagtcaccatgatccctatcaaaattcccatgcccaggccagggacatggcctagtgcttgaaggcactcacagccaagcctgatgacccaagtgacccagggaccatgaggtggagggaaagaaccaagtctcaaaagctggtcctccccatagggctcacagggactgaaccaccaaccaaagagcacacagggcccctactcatctgtagcagatgtgcagcttggtcttcatgtgggtcctgaacaactggagcagaggctgtctctgattcttgcctgccactgaagaagatgtgatgtagaacgggtgatcaggatgtaaagggaataaataaataaattaattaatgaaaaacattttttaaattaaaaa

SEQ ID NO: 226 - DNA, 230 bp, Mus musculus
  misc_feature (1)...(230): n = A,T,C or G
tccagactgccctttgggattcaaacgggagccgctttggactgactggctgccttcctcctcctccccctcctcccccttctgcttcagatttatttattatatgtaagtacactgtagcagttgtaggacacactagacgagggcaccagatctcattgtgggtggttgtgaaccacccaccatgtggttgctgggatnggnactcaggatcttcagaagagcagtca

SEQ ID NO: 227 - DNA, 188 bp, Mus musculus
  misc_feature (1)...(188): n = A,T,C or G
aaacagtgtgactccttgacaacagtgtgcctcgntatgggtttatgaaaccagttaacagtcttcctccaaggtctctgcttcagtccctggctccaggaaatgccctgcttgngtttctgctctgacttcccccagtgatggaatgntaccatggaagataanataaatctttcccacatcaaaaa

SEQ ID NO: 228 - DNA, 287 bp, Mus musculus
  misc_feature (1)...(287): n = A,T,C or G
tctaggaagagtcgacncngcnttgaactcactggatacccaaggatggcactgaacttctcatccttctaattcccaagtgttaagatttcaggtatgggctggtgagatggctcagtgggtaagagcgcccgactgctcttccgaaggtctgaagttcaaatcccagcaaccacatggtggctcacaaccatctgtaacaagatctgacgccctcttctggagtgtctgaagacagctacagtgtacttacatataataaataaataaatctttaaaaaaaaaaa

SEQ ID NO: 229 - DNA, 375 bp, Mus musculus
  misc_feature (1)...(375): n = A,T,C or G
agagaggggcatcaacccanccacaanaccttcaaccnacantgtggtctgcctacnagatacacagggataaagatggancagagattgaggggactgggcaaccagtgactgcctaactcgagacccatcccatgggagagagccaacccctgccactattgacactcggctatgcttgcagacagtgtgactccttgacaacagngtgccttgctatggntntatgaaaccanttaacagtcttcctccaaggtctctgcttcagtccctgcctccaggaaatgccctgcttgtgtttctgctctgacttcccccagtgatggaatgttaccatggaagataaaataaatctttcccacatcaaaaaaaaaa

SEQ ID NO: 230 - DNA, 267 bp, Mus musculus
tttctctgtgtagttctggctgtcctagaactcagagatccacctacctctgattcaaaggactaggattaaatgcccggttaaagaagatactccagggctggagagatggctcagtggttcagatcacagactgctcgtccagaggtcctgagttcaattcccagcaaccacaaggtggctcacaacacctcttctggtgtgtctaaagacagcaacagtgtattcatgtacattaaatgaataaataaattgtaaaaaaaaaaa

SEQ ID NO: 231 - DNA, 239 bp, Mus musculus
agtgttttgcctgtgtgtatatatgtacacgtatgtacaccatgtcatgagcctccatggtcgtgagaggactttggatcccttggaactggcgttacattggtcgtgagcctccatgttggcgctgagaagcaaacctgggttctctggaagcgcagcaagtgctcttaaccatcgagccatctctccatctcaaaccacccatgtatataaaatgaaaatacataaaccaaaaaaaa

SEQ ID NO: 232 - DNA, 335 bp, Mus musculus
  misc_feature (1)...(335): n = A,T,C or G
gcattaactgtggctggcttacagtttcagaggtttagttcgttattaccatggttggtgctggagaagtggctganaggtctacatctgaatccacaagcatcaggaagaaagagtgaccgtgaacctggcttggatttttgatgcctcaaaacccaccccccaatgacacagtttctccaacaaggcctccaatgacacctactgcaacaaatagtgccattctctaaacactcaaatatatgagcctatgggaccgttcttactcaacccccacatatatgtatatgcacctatgttcccaaatataatctcttccactcataaaaaaaaaa

SEQ ID NO: 233 - DNA, 315 bp, Mus musculus
  misc_feature (1)...(315): n = A,T,C or G
ttgaaacagtacgtgcagcctcccccagnctgaagctggctgttgcaaaccttgctgctactgagaatgagaccacctggggtggagccttccgacctagatggctccattgttctgtcacttgccgctgctctcctccaagacactgctacctgctgagaggcccctgagatattccagaggcacatcctatcctgcacatcctcgcctgcaggctggctccaggcaccaagaatggattggcgggggatgggctttcccctttttaagcacagtctctgagtaaaatctcgggccttgatcagaaaaaaaaaa

SEQ ID NO: 234 - DNA, 362 bp, Mus musculus
  misc_feature (1)...(362): n = A,T,C or G
gggttccaagactgccctttgggattcaaacgggagccgctttggactgactggctgccttcctcctcctccccctcctcccccttctgcttcagatttatttattatatgtaagtacactgtagcagttgtaggacacactagacgagggcaccagatctcattgtgggtggttgtgaaccacccaccatgtggttgctgggatttgaactcaggatcttcagaagagcagtcanggctntaaaccgnngnnccatctctccagcctnctgcnttccttcntaaggcatgaatgatcccancatnngaagacagncntgcnctncntccttttcagagccatnttactttcaccattttcc

SEQ ID NO: 235 - DNA, 411 bp, Mus musculus
  misc_feature (1)...(411): n = A,T,C or G
aactggtcacctactgtaaccagacaggacttcctgtgaagagagaggggcatcaacccacccacaaaaccttcaacccaaaatgtgttctgcctacaagatacacagggataaagatggagcagagattgaggggacggccaaccagtgactgcctaactcgagacccatcccatgggagagagccaacccctgccactattgacactcggctatgcttgcagacagtgtgactccttgacaacagtgtgcctcgttatggttttatgaaaccagttaacagtcttcctccaaggtctctgcttcagtccctgcctccaggaaatgccctgcttgtgtttctgctctgacttnccccantgaagggatggttacnttggaagataaaataaatctttcccacatcaaaaa

SEQ ID NO: 236 - DNA, 233 bp, Mus musculus
  misc_feature (1)...(233): n = A,T,C or G
aactggagacccatcccatggganagagccancatnctgccntttgacgctcgtatatgcttgaanacagtatgactccttgacaacagtgtgcctcgntatggttttatgaaaccagttaacagtcttcctncaaggtctctgctttantccctgtcttcaggaaatgccctgcttgngtttntgntctgacttnccccanngatggaatggtaccatggaagattaaattt

SEQ ID NO: 237 - DNA, 190 bp, Mus musculus
  misc_feature (1)...(190): n = A,T,C or G
caagtcccaggattcatgctgnaagtcacaaccaggagtaacttcagctccaggggacccaacatncttctgacctcctcagaaacctgcacacatnngacggactctctctctctctctctctctgtgtgtgngngngtgactgtntgtntgtctctctctctctntgtgtntgtctctctctctctcc

SEQ ID NO: 238 - DNA, 309 bp, Mus musculus
  misc_feature (1)...(309): n = A,T,C or G
gacctgattccacagncagcgaccagnacccatnatcnaggatcaggctgnanagatggctcagtactacancncacctgctgntcttccagaggacatgagttttattcccnntgcncatatttggcagntcacagctacccataactccaattctaggcgtccnatgccctnttttagctccagcggtcaccccacanatgtttacgccacatattcncngnataattttangatccttttttaaaanancctgacntcttcccccaaanaatnaacgatgaaaanaagagaacaatgaaaaaaaaa

SEQ ID NO: 239 - DNA, 209 bp, Mus musculus
agataaagaaaccgccgccaaggttgacatcaagatagcctggaactgatggttgtgagctgtcacatggagaatcgaaattgaacctgggtcctctggaagggcaaccaatatccttaactgctgagctatttctccagccccttccaccatcggttctcttggcagagaaaacaagagaaaaaggacactatggaaaaataaagaaa

SEQ ID NO: 240 - DNA, 400 bp, Mus musculus
gaactggtccctactgtaaccagacaggacttcctgtgaagagagaggggcatcaacccacccacaaaaccttcaacccaaaatgtgttctgcctacaagatacacagggataaagatggagcagagattgaggggacggccaaccagtgactgcctaactcgagacccatcccatgggagagagccaacccctgccactattgacactcggctatgcttgcagacagtgtgactccttgacaacagtgtgcctcgttatggttttatgaaaccagttaacagtcttcctccaaggtctctgcttcagtccctgcctccaggaaatgccctgcttgtgtttctgctctgacttcccccagtgatggaatgttaccatggaagataaataaatctttccac

SEQ ID NO: 241 - DNA, 285 bp, Mus musculus
  misc_feature (1)...(285): n = A,T,C or G
gggttccagactgccctttgggattcaaacgggagccgctttggactgactggctgccttcctcctcctccccctcctcccccttctgcttcagatttatttattatatgtaagtacactgtagcagttgtaggacacactagacgagggcaccagatctcattgtgggtggttgngaaccacccaccatgtggttgntgggatttgaactcaggancttcagaagagcaggnaagggctctaaaccgatgagccatctntccagcctcctgcattccttcttaa

SEQ ID NO: 242 - DNA, 238 bp, Mus musculus; identical to SEQ ID NO: 222

SEQ ID NO: 243 - DNA, 256 bp, Mus musculus
  misc_feature (1)...(256): n = A,T,C or G
gatgctgccaggctatgggtgtcccaggtactgacaggaccncaccattgctgtctttaagaaacttgctgggggctggcgagatggctcagtggttaagagcatcaactgcttttccgaaggtcccgagttcaaatcccagcaaccacatggtggctcacaaccacccgtaaagaaatctgatgccttcttctggaagatctgaggacagctacagtgtacttacatataataaataaatctttaaaaaaaaaaa

SEQ ID NO: 244 - DNA, 213 bp, Mus musculus
agggctggagacccaacttagggcttcacgggtgctggctgagagctctaccactgagctacactcacagccttctatggtgattcatagaaagatttgttttctaccaaattcatgttaattacacatatgtataaaacaccttttgccttcattttcattgaatgtggggcccctgtaaaagacaataaatactgtctctcttgaagtcaa

SEQ ID NO: 245 - DNA, 430 bp, Mus musculus
gacgtggggataaaacccagcgcctcacacattctggctaaggattctacctctccagcactcctctgaacaaatacatcctccaacgtaactgtggatggcgacctggacacttttttctccttgtttagtcgtccctggtccagctgacagaaccttggcagtctctttccacttctacttccagcccccttctccatcagtcttggattattgaataattcaatagctccagacccagaagccatcactctgatccagctataccaccactcaaacatttcccctagagcttccctgatgcagaattgtgaggagcgggtgtggcagcaatcccaagatggtgcctgggactgcagccaagtcttatgacttgcacctgacttcctcatacacttgaaaataagccgcatccatcgtgagaactgtg

SEQ ID NO: 246 - DNA, 379 bp, Mus musculus
  misc_feature (1)...(379): n = A,T,C or G
aaccaacaaccaataaccagtcaccagcaatctaacaatccaccaacccagccatccagccatccaccaacccagccatccagccatccagcaaaccagccatccagccatncagncatncaccancccagccatccagccatccagcaacccagccatccagccatccagcaacccagccatccagccatccagcaatagcaaaagcagcaaatgcagcagcagggaccaacagcagggggagcagtagcccccgccccaggctctctgggagctcttgaatttataccctctcaagagtccccagaattccaaatgcaaactatctgcaggtggcaaaaatcatagttagcagccctgnatcccacacctggagatt

SEQ ID NO: 247 - DNA, 176 bp, Mus musculus
agactgccctttgggattcaaacgggagccgctttggactgactggctgccttcctcctcctccccctcctcccccttctgcttcagatttatttattatatgtaagtacactgtagcagttgtaggacacactagacgagggcaccagatctcattgtgggtggttgtgaaccac

SEQ ID NO: 248 - DNA, 254 bp, Mus musculus
  misc_feature (1)...(254): n = A,T,C or G
cctttgggattcaaacgggagccgctttggactgactggctgccttcctcctcctccccctcctcccccttctgcttcagatttatttattatatgtaagtacactgtagcagttgtaggacacactagacgagggcaccagatctcattgtgggtgggnnctngncaaancttacgaccatcanntccnntctgtnttntnannanccggngtgccttttgttaaataaatnatttctattataaaaaaaaaa

SEQ ID NO: 249 - DNA, 253 bp, Mus musculus
  misc_feature (1)...(253): n = A,T,C or G
cagactgccctttgggattcaaacgggagccgctttggactgactggctgccttcctcctcctccccctcctcccccttctgcttcagatttatttattatatgtaagtacactgtagcagttgtaggacacactagacgagggcaccagatctcattgtgggtggttgaanaaccagccancttgtggtagatgaananatcaagncannantcncgnaacaatattcatgtaggatttatcatggaatcct

SEQ ID NO: 250 - DNA, 427 bp, Mus musculus
  misc_feature (1)...(427): n = A,T,C or G
gaaagccagcagcccagcataccaacaaccaataaccagtcaccagcaatccaacaatccaccaacccagccatccagccatccaccaacccagccatccagccatncagcaaaccagccatccagccatccagccatncaccaacccagccatccagccatccagcaacccagccatccagccatccagcaacccagncatccagccatccagcaatagcaaaagcngcaaatgcagcagcagggaccaacagcagggggagcagtagcccccgccccaggctctctgggagctcttgaatttataccctctcaagagtccccagaattccaaatgcaaactatctgcaggtggcaaaaatcatagttagcagccctgtatcccacacctgagattaaagcaaaaacataatcacataaaaaaaaa

SEQ ID NO: 251 - DNA, 266 bp, Mus musculus
ggggtctttcaatagaagaaggaagctgctgttcttggcctgctttccctcaccttaccagcatattcatcacttccctggcactggagcctagttctttgggatcccagcatggacagaagaccagctgagacatccagccttgtgggactgagcagctactggattcttagacattccactcacagccagctgttgttgattagctcgattgcagcctgcaagtcatttcatttcaataaaacccatatgtatacaaaaaaaaa

SEQ ID NO: 252 - DNA, 378 bp, Mus musculus
tgctggagcaatggagcaggtcttcctctaaagagccgcatctaatctcacgcagaaggcctctttgagctcccagacacagtttcaaccaagccaaaccacccgcctgagcaagccagagacactcctgtccccaagggacccagctggagctctcctccccccttttcctttccgcccctggttagattcagcccaagggccacactctgttctcagctcttcctcgactttgagcagcatctgtggtgtccaagagctagaacctgctgtccctggcctttgtgtggccccggggatccataagccagctccccagcagttccccggggacctcagactgtgcctccccacccacagtggggtcctgcggcttct

SEQ ID NO: 253 - DNA, 411 bp, Mus musculus
gactggtccctactgtaaccagacaggacttcctgtgaagagagaggggcatcaacccacccacaaaaccttcaacccaaaatgtgttctgcctacaagatacacagggataaagatggagcagagattgaggggacggccaaccagtgactgcctaactcgagacccatcccatgggagagagccaacccctgccactattgacactcggctatgcttgcagacagtgtgactccttgacaacagtgtgcctcgttatggttttatgaaaccagttaacagtcttcctccaaggtctctgcttcagtccctgcctccaggaaatgccctgcttgtgtttctgctctgacttcccccagtgatggaatgttaccatggaagataaaataaatcttttccacattaaaaaaa

SEQ ID NO: 254 - DNA, 226 bp, Mus musculus
  misc_feature (1)...(226): n = A,T,C or G
ctgaagcaggttgattcagacttgacctcgctgccgctgagcatgagaccacctggggtggagccttccgacctanccggctctattgttctgtnacctgctgctgctcgtctccaagacactgctacctgctgaaaggcccttgagataatctggagacagcatccagccgatcacctactggctggcgaagggcaccaagaatggattgtttggggggggcgga

SEQ ID NO: 255 - DNA, 238 bp, Mus musculus
gcctcccccagccctgaagcaggttgattcagacttgacctcgctgccgctgagcatgagaccacctggggtggagccttccgacctagccggctctattgttctgtcacctgctgctgctcgtctccaagacactgctacctgctgaaaggcccttgagataatctggagacagcatccagccgatcacctactggctggcgaagggcaccaagaatggattgtttggggggggcgg

SEQ ID NO: 256 - DNA, 384 bp, Mus musculus
  misc_feature (1)...(384): n = A,T,C or G
gactggtcacctactgtaaccagacaggacttcctgtgangagagaggggcatcaacccacccacaaaaccttcaacccaaaatgtgttctgcctacaagatacacagggataaagatggagcagagattgaggggacggccaaccagtgactgcctaactcgagacccatcccatgggagagagccaacccctgccactattgacactcggctatgcttgcagacagtgtgactccttgacaacagtgtgcctcgttatggttttatgaaaccagttaacagtcttcctccaaggtctctgcttcagtccctgcctccaggaaatgccctgcttgtgtttctgctctgacttcccccagtgatggaatgttaccatggaagat

SEQ ID NO: 257 - DNA, 216 bp, Mus musculus
  misc_feature (1)...(216): n = A,T,C or G
actgcttaattgctggacgnatcnggcctaacnctggaaantaatgcatcttccagaaaagtgtttaacatagacnngagttgcctttaatcctagcacttgggaggcagaggcagatggatttctgagatcgaggccagcctggtctacaaagtgagttccaggacagccagggccacacanagaaaccctgtcttggaaaacaaacacaaacaa

SEQ ID NO: 258 - DNA, 279 bp, Mus musculus
  misc_feature (1)...(279): n = A,T,C or G
atgaacactgcagtaaagcaacacggaggaccacccagctctgtgctcagaagaggatgcagcatacgacnggacacttggtatagaaatgattccggnctggtgagatggctcagtgggtnagagcacccgactgctcttccgaaggtcttggagcatcanattccaatanncanntggaggatcncaaccatccntancnagatttgncaccctcttctggagngtctgaaaacagntacagnggacttacatataatatataaataaatcttaata

SEQ ID NO: 259 - DNA, 345 bp, Mus musculus
  misc_feature (1)...(345): n = A,T,C or G
agctgggcccagctcatagagccgagggggcaactcagacaagctgaatttccaagactcaagagangggaatctgcaagatgactcagaccagagcagctgcctggaagaagcngaaaccagacgagctggaagagataggatcanccgnggcgcctgggaagaagtgcccgacctgcttcgttgcctgcaggctgtgcagtgtgctcctgagaactgtcacccatgctggggcgggccttcatgatgcagctgtcttttaaacatctctgtaagtgctncccctcacccacattcctgtaagtgacttcaataaaacccattgcttcatcaaaaataaaatat

SEQ ID NO: 260 - DNA, 433 bp, Mus musculus
  misc_feature (1)...(433): n = A,T,C or G
ggaaattaccatcaagtgactggatgaacctgagaagagatttgaactttggacttttagcattgttgagactgctgtggactatggggagttttgaaattgaactaaatgtatttctcattatgctatggctagggatggcccccacagactcatgtgtttgaacaaacctatgggggccagtgagtacaatgtggtggtttgaatatgcttggcccagggagtggcactgtgtgaccctgttggacgaagtgtgtcactgttggggtgggcaaagagagcttcctcctagctgcctggggatgccagtctcttctggntgccttcaaatcaagatgcagaactcttancttctttttcaggnntaangnntgcctggcactgccatgctttgcttcctgctgngatgataatggactgaacctctgaaact

SEQ ID NO: 261 - DNA, 320 bp, Mus musculus
  misc_feature (1)...(320): n = A,T,C or G
gactcccccagccctgaancaggttgattcagacttgacctcgctgccgctgagcatgagaccacctggggtggagccttccgacctagccggctctattgttctgtcacctgctgctgctcgtctccaagacactgctacctgctgaaaggcccttgagataatctggagacagcatccagccgatcacctactggctggcgaagggcaccaagaatggattgtttggggggggcgggggaggaatggtgggatggggatggncggcccctctttataagtacagactcttantaaactttggggccttgaacagaaaa

SEQ ID NO: 262 - DNA, 321 bp, Mus musculus
aggctcccccagccctgaagcaggttgattcagacttgacctcgctgccgctgagcatgagaccacctggggtggagccttccgacctagccggctctattgttctgtcacctgctgctgctcgtctccaagacactgctacctgctgaaaggcccttgagataatctggagacagcatccagccgatcacctactggctggcgaagggcaccaagaatggattgtttggggggggcgggggaggaatggtgggatggggatgggcggcccctctttataagtacagactcttagtaaactttggggccttgaacagaaaa

SEQ ID NO: 263 - DNA, 410 bp, Mus musculus
  misc_feature (1)...(410): n = A,T,C or G
gacaggagcctagcatgactgtcctctgggaggctccacccancaggccaatggaaagagatacangagattcacatgccaaacagttgatggagctcaaggagtggaagaaaggttggggaccttaagaagacagagactccacagaaagtccaacagagtcaactaacctaaatgcctggggctgccagaaactgaaccatcaactaaagagtgagcactggctggacataggcccccctcacgtatgtatggatgagcagcttggtcttcatgcaggagcctgggcctgagcctgctgcctgcctgcctgtgaatactgcactccaaaatagacagccttgtctggcctcagtgggagaggatgtgtctagtcccttaggaacttgatgtgttgggtgggaagggtg

SEQ ID NO: 264 - DNA, 317 bp, Mus musculus
  misc_feature (1)...(317): n = A,T,C or G
gcctcccccagccctnaagcaggttgattcagacttgacctcgctgccgctgagcatgagaccacctggggtggagccttccgacctagccggctctattgttctgtcacctgctgctgctcgtctccaagacactgctacctgctgaaaggcccttgagataatctggagacagcatccagccgatcacctactggctggcgaagggcaccaagaatggattgtttggggggggcgggggaggaatggtgggatggggatgggcggcccctctttataagtacagactcttagnaaactttggggccttgaacaga

SEQ ID NO: 265 - DNA, 182 bp, Mus musculus
  misc_feature (1)...(182): n = A,T,C or G
ccttcatagagagagagagagagncagagagagagagagngagagagagagagagaganaaanaccctnanncnagctgactggaaggcagactacnactntcagccttcatactgnacatgnncaactctgnntcatgnctggaccatgcctgcctggatgctgccatgagccaccttgag

SEQ ID NO: 266 - DNA, 246 bp, Mus musculus
  misc_feature (1)...(246): n = A,T,C or G
gattcaaacgggagccnctttggactgactggctgccttcctcctcctccccctcctcccccttctgcttcagatttatttattatatgtaagtacactgtagcagtngtaggacacactagacgagggcaccagatctcattgtgggtggttgcattntacacctcaaaactncaacnntcctatctgncttttcangagccaatgtgcctttttttaaataaataattactattaaaaaaaaaa

SEQ ID NO: 267 - DNA, 139 bp, Mus musculus
gctcagcatggaagctcccagctaccgctccagtgcgatgcctgtctgcccactgtcatgctccacgccacgatggccatggactctaatgctctgtgactgtgaaccccaataaactcgttcttttataaaaaaaaaa

SEQ ID NO: 268 - DNA, 210 bp, Mus musculus
  misc_feature (1)...(210): n = A,T,C or G
gcctgaaacctgcttgctcangggtggagcttctcgctcaatctttttgccacgcctactgctggaacctgaggctttgttgttctgaagccatcacgtgatcaccctgctactggactccaagattacttggcgaattgggcccctcccccttcctttataactgagtgccgaaatagtaaatattgaaccttgcgcagaaaaaaaaaa

SEQ ID NO: 269 - DNA, 264 bp, Mus musculus
  misc_feature (1)...(264): n = A,T,C or G
cagcctgcaccttttccccacctcagtgcactacaagggtgcaattccctcagaggccagaagagggcactggagcccctggaacggtgagccatcctgtaggtgggaagaattgaacctgagtcttctggaagaacaagcagngctcttaactgctgacccatgtctctctccagcacccttttcttttgttttagngtccttgcatgccacagatactcaaagattnatgaataaaataacatgatatctaagaaaaaaaaa

SEQ ID NO: 270 - DNA, 302 bp, Mus musculus
  misc_feature (1)...(302): n = A,T,C or G
atggaagcaacagatngaggggacangccnaccagtgncngcctaactngagacccatcccatgggagagagccaacccctgccactattgacactcggctatgcttgcagacagtgtgactccttgacaacagtgtgcctcgttatggttttatgaaaccagttaacagtcttcctccaaggtctctgcttcagtccctgcctccaggaaatgccctgcttgtgtttctgctctgacttcccccagtgatggaatgttaccatggaagataaaataaatctttcccacatcaaaaaaaaaa

SEQ ID NO: 271 - DNA, 360 bp, Mus musculus
  misc_feature (1)...(360): n = A,T,C or G
gggttccaagactgccctttgggattcaaacgggagccgctttggactgactggctgccttcctcctcctccccctcctcccccttctgcttcagatttatttattatatgtaagtacactgtagcagttgtaggacacactagacgagggcaccagatctcattgtgggtggttgngaaccacccaccatgtggttgctgggatttgaactcaggatcttcagaagagcagtcagggctctaaaccgctgagccatctctccagcctcctgcattccttcttaaggcatgaatgatcccagcataggaagacagtctgccctccctcctttncgagccattttccctttcaccatatac

SEQ ID NO: 272 - DNA, 201 bp, Mus musculus
ggggaccggagagatgtctcagaggctaagcctctcctgtccttgttgaggacctgaattcagttgccagcagctcacagccagctggaactccagctccgggggatctgacaccctcttctgcccttctagaactaccatattcatgtgcacacactcatatacaaatcacttaaaatacaaataaacattctactaaag

SEQ ID NO: 273 - DNA, 311 bp, Mus musculus
  misc_feature (1)...(311): n = A,T,C or G
ccagtcctgaagcaggttgattcagacttgacctcgctgccgctgagcatgagaccacctggggngganccttccnacctagccggctctattgttntgtnacctgctgctgctcgtctccaagacactgctacctgctgaaaggcccttgagataatctggagacagcatccagccgatcacctactggctggcgaagggcaccaagaatggattgtttggggggggcgggggaggaatggtgggatggggatgggcggcccctctttataagtacagactcttagtaaactttggggccttgaacagaa

SEQ ID NO: 274 - DNA, 151 bp, Mus musculus
gccaggcatgggtggtacatgcctttaatctccgcacttgggaggcagagacagatggatctctgtgagttcaaggccagcctcgtctacagagagagttccaagacagctagggatacagagaaaaacccagtcttgaaaaaaaaaatca

SEQ ID NO: 275 - DNA, 263 bp, Mus musculus
  misc_feature (1)...(263): n = A,T,C or G
gcatgcaccatgccactatacctggtcagnggcngncattatatgagtctgggtgctgggtaacantaaagcaagatgctttcagnncgtaaaaanccctanattggncnggcngagganangcacgccnttnnaacntnaacactccggaggcnaaggcaggcaaatttctgagttcnaggccagcctggtctacaaagtgagtcccaggacagccagggctatacagagaaaccctgtctcaaaaaacccaaaaaaaaaaa

SEQ ID NO: 276 - DNA, 208 bp, Mus musculus
  misc_feature (1)...(208): n = A,T,C or G
ggtactggagagaggantggctcagtgattaagaagattctntgctcttccagagggctggttcaattntcagcacccaaatggtggctttccatcacccgtggcttcagttccagatctgatgcattctggcctccttgggcatnaggcatgcgcattgcatacacatatacacacaggcaaaacacataataataaacattcactt

SEQ ID NO: 277 - DNA, 241 bp, Mus musculus
tatataaacagtaagaactgctgaggagaacagactagcctgctgcctggaagagactcagacctgcctgaaggagagattctctgtcctgttgagctctccacaagtagtgtaatgaactccagggttcctgctcttggtgatgtagctatatttgagttgaccctgcccctgcccttgcccttttacttatattcttgtgaataactctaataaactcattggattaccaaaaaaaaaa

SEQ ID NO: 278 - DNA, 443 bp, Mus musculus
  misc_feature (1)...(443): n = A,T,C or G
ctgcttcagacattccagaaaaccgcatcagatttcattacggatcccaccatgtggttgctgggatttgaactcaggacctttggaagagcagtcggtgctcttaaccgctgagccatctcaccagcccgctttagtttttcaagacagggtttctctgtgtagtcctggctgtcctggaactctgtagaccaggctggtctccaactctgagatctacctgccctgcctcttaaatgctaagactaacagcatgtgccaccactgctgggctcttagcattcatttttgtgtgaaaataaaaatgggtaaaaagctgganaaangcntnnnannntanggactggggatgctgagaaaggatcttttgggcctaggaattgtttgaagtccagtctggacaacaaaagaaagattctgtctcaaagataaataaaaataaa

SEQ ID NO: 279 - DNA, 251 bp, Mus musculus
  misc_feature (1)...(251): n = A,T,C or G
ggtggggtctttcaaccgaactggactgctggtgnatccatgaggngttctcgagngnatccagcntgccattgcctgctgagctgtgacctgaactgctgattnccagacaacacagatgggagttgctccaaagaacctttntaaacaggtccacttcccctgtatcctatctttcccactacctctggtgggtggtaggctagganggaggttaaattgcttatgaatcancattagtaaatactatt

SEQ ID NO: 280 - DNA, 627 bp, Mus musculus
  misc_feature (1)...(627): n = A,T,C or G
gcagcctgggctatcaggagaatttgangtttctcagcggataaagcagaccagaccctgggatgaagggcctgtttccccaagccttccttccgtgtcaccataattttcctgtctttctatttgtctcagtcctgctgatcatcagactgaagtgagaacttccaatttctttggaaagccagttatgtcaaatgatgttttgctgggacacacaagggacaggctgttttgctgaagcagacacaggtgaacaatattttgctaaagcacacatgtgaaaggatacaggatgaaggcttataaatatgacccaacaaacaatgggagctcgagcgctgctttgctttgctccacctctctattcttcgctgacaacacatgtgttcgtcttacgttgcgtggctgagttccacttgtggtgatgccatagaggaaaacgtatcaaagaacttctcacgaagttcctgcaggttcttgctgcttctacagaccctggctggtggtgagccttggggtttcttctggattaaactgcctttgttggtttgngtgtggtgcctgccaagtggactgggactgcagctactgattgaatttaagggtttgctactgaactgaactgct

SEQ ID NO: 281 - DNA, 317 bp, Mus musculus
  misc_feature (1)...(317): n = A,T,C or G
cagccctgaagcaggttgattcangacttgacctcgctgccgctgancatganaccacctggggtggagccttccgacctagccggctctattgttctgtcacctgctgctgctcgtctccaagacactgctacctgctgaaaggcccttgagataatctggagacagcatccagccgatcacctactggctggcgaanggcaccaagaatggattgtttggggggggcggnggaggaatggtgggatggngatgggcggcccctctttataagtacagactcttagtaaactttggggccttgaacagaaaaaaaa

SEQ ID NO: 282 - DNA, 127 bp, Mus musculus
gttaaatgaaatttgacaacaacaagatgaatagcagccgcagccgcgtcaggatccaaggccaatacactgggacatcacctgtacagaaccaaaacaaacaagcaaataaacaaacaaacaaaaa

SEQ ID NO: 283 - DNA, 328 bp, Mus musculus
gaatttgcagttctgacaagattcatccgcagggacacacgaaatgatctacagttccagctacctgcctcccaaaacagcatgaagaacagctgttgattcccaatgaattcagttcatccagcctttcagatggatccagtaaggacttcagtcaagtcctgagccttctaagcatacagagactggataacaaatgctaaagctagctttcttaagtctaaccaatttttctaattttcttactcctccccactttaaaaaattttagcattggaaatgtaattgaggaaaatacgtaataaaaaattatcttcaaaaaaaaaaa

SEQ ID NO: 284 - DNA, 263 bp, Mus musculus
  misc_feature (1)...(263): n = A,T,C or G
tggatgataggtccacagtanacgctgatnactccagctccaggnggatttgacgattactgcacntgtgntgataggnccgnanctataatntnganacagcatccanccgatcacctactggctggcgaagggcaccaagaatggattgtttggggngggcgagggaggaatnttnctangttcaaggccagcctggtctacagagtgagttccaggacagccagggctacacaaagaaaccctgtctcaaaaaaccaaaa

SEQ ID NO: 285 - DNA, 195 bp, Mus musculus
  misc_feature (1)...(195): n = A,T,C or G
gggttccagactgccctttgggattcaaacgggagccgctttggactgactggctgccttcctcctcctccccctcctcccccttctgcttcagatttatttattatatgtaagtacactgtagcagttgtaggacacactagacgagggcaccagatctcattgtgggtggttgtganccacccaccatgtgga

SEQ ID NO: 286 - DNA, 259 bp, Mus musculus
  misc_feature (1)...(259): n = A,T,C or G
ccccagccctgaagcaggttgattcagacttgacctcgctgccgctgagcatgagaccacctggggtggagccttccgacctagccggctctattgttctgtcacctgctgctgctcgtctccaagacactgctacctgctgaaaggcccttgagataatctggagacagcatccagccgatcacctactggctggccgaaaggcaccnaaaaaggantggttggggggggcgggggaggaatggtgggatggggatgg

SEQ ID NO: 287 - DNA, 127 bp, Mus musculus
gacccttggtgctaccacttctgagcatctggatgtctctgcagtgttggggtactactacgtgtgtctgaagacagctacagtgtactcatatcaaatatataaatatttaggggaaaaaaaaaaa

SEQ ID NO: 288 - DNA, 307 bp, Mus musculus
  misc_feature (1)...(307): n = A,T,C or G
tcctctctttcagcccgagctgccatctcagttgaaccattcctctcgagctgctggttggcccgcaacaagtccagcctattgtgggtgatgccacccctgggttggtggccctggattctataagaaagctggctgagaaagccatgggaagcaagccagtaagcagcacccctccatggcctntgtatcagctcatacctccaggttccagccccgattgaattcctgtcctgacttcctccaatgatggattatgatctggaaatcctagccaaataaacacttttctccccaaaaaaaaaaa

SEQ ID NO: 289 - DNA, 209 bp, Mus musculus; identical to SEQ ID NO: 239

SEQ ID NO: 290 - DNA, 319 bp, Mus musculus
  misc_feature (1)...(319): n = A,T,C or G
agcctcccccagccctgaagcaggttgattcagacttgacctcgctgccgctgagcatgagaccacctggggtggagccttccgacctagccggctctattgttctgtcacctgctgctgctcgtctccaagacactgctacctgctgaaaggcccttgagataatctggagacagcatccagccgatcacctactggctggcgaagggcaccaagaatggattgtttggggggggcggnggaggaatggtgggatggggatgggcggcccctctttataagtacagactcttagtaaactttggggccttgaacagaa

SEQ ID NO: 291 - DNA, 111 bp, Mus musculus
  misc_feature (1)...(111): n = A,T,C or G
tcttctggtatacagaaacacacgcatactgcatntgtggagcacatgcatngaccgcacaggaaatactcatatacataaaagacaaataaataaatctaaaaaaaaaaa

SEQ ID NO: 292 - DNA, 415 bp, Mus musculus; identical to SEQ ID NO: 194

SEQ ID NO: 293 - DNA, 313 bp, Mus musculus
  misc_feature (1)...(313): n = A,T,C or G
gttccaagactgccctttgggattcaaacgggagccgctttggactgactggctgccttcctcctcctccccctcctcccccttctgcttcagatttatttattatatgtaagtacactgtagcagttgtaggacacactagacgagggcaccagatctcattgtgggtggttgtgaaccacccaccatgtggttgctgggatttgaactcaggatcttcagaagagcagncagggctctaaaccgctgagccatctctccagcctcctgcattccttcttaaggcatgaatgatcccagcataggaagacag

SEQ ID NO: 294 - DNA, 318 bp, Mus musculus
  misc_feature (1)...(318): n = A,T,C or G
agcctcccccagccctgaagcaggttgattcagacttgacctcgctgccgctgagcatgagaccacctggggtggagccttccgacctagccggctctattgttctgtcacctgctgctgctcgtctccaagacactgctacctgctgaaaggcccttgagataatctggagacagcatccagccgatcacctactggctggcgaagggcaccaagaatggattgtttggggggggcggnggaggaatggtgggatggggatgggcggcccctctttataagtacagactcttagtaaactttggggccttgaacaga

SEQ ID NO: 295 - DNA, 388 bp, Mus musculus
  misc_feature (1)...(388): n = A,T,C or G
caccagcaatccaacaatccaccaacccagccatccagccatccaccaacccagccatccagccatccagcaaaccagccatccagccatccagccatccaccaacccagccatccagccatccagcaacccagccatccagccatccagcaacccagccatccagccatccagcaatagcaaaagcagcaaatgcagcagcagggaccaacagcagggggagcagtagcccccgccccaggctctctgggagctcttgaatttataccctctcaagagtccccagaattccaaatgcaaactatntggaggngggaaaaaatattagttagcagccctgtatcccacacctgagattaaagcaaaaacataatcacataaaaaaaaa

SEQ ID NO: 296 - DNA, 362 bp, Mus musculus
  misc_feature (1)...(362): n = A,T,C or G
ttccagactgccctttgggattcaaacgggagccgctttggactgactggctgccttcctcctcctccccctcctcccccttctgcttcagatttatttattatatgtaagtacactgtagcagttgtaggacacactagacgagggcaccagatctcattgtgggngggttgtgaaccacccaccatgtggttgctgggatttgaactcaggatcttcagaagagcagtcagggctctaaaccgctgagccatctctccagcctcctgcattccttcttaaggcatgaatgatcccagcataggaagacagnctgccctccctccttttcgagccattttccctttaccatatactcaata

SEQ ID NO: 297 - DNA, 221 bp, Mus musculus
tatatgtacaccgtatgtacaccatgtcatgagcctccatggtcgtgagaggactttggatcccttggaactggcgttacattggtcgtgagcctccatgttggcgctgagaagcaaacctgggttctctggaagcgcagcaagtgctcttaaccatcgagccatctctccatctcaaaccacccatgtatataaaatgaaaatacataaaccaaaaaaaa

SEQ ID NO: 298 - DNA, 445 bp, Mus musculus
  misc_feature (1)...(445): n = A,T,C or G
cgtaggcaatgtgggagctggaaagaagtanaattggaacctacngtancnntataggacttactgngaaganagaggggcatagcccacccacaaaaccttcancccaaaatgtgttctgcctacaagatacacagggatatnngatggagcagagattgaggggacggncaaccagngactgcctaactcgagacccatcccatgggagagagccaacccctgccactattgacactcggctatgcttgcagacagtgtgactccttgacaacagtgtgcctcgttatggttttatgaaaccagttaacagtcttcctccaaggtctctgcttcagtccctgcctccaggaaatgccctgcttgtgtttctgctctgacttcccccagtgatggaatgttaccatggaagataaaataaatctttcccacatcaaaaaaaaaa

SEQ ID NO: 299 - DNA, 412 bp, Mus musculus
  misc_feature (1)...(412): n = A,T,C or G
gactggacctactgaacnagacaggacttcctgtgaagagagaggggcataaacccacccacaaaaccttcaacccaaaatgtgttctgcctacaagatacacagggataaagatggagcagagattgaggggacggccaaccagtgactgcctaactcgagacccatcccatgggagagagccaacccctgccactattgacactcggctatgcttgcagacagtgtgactccttgacaacagtgtgcctcgttatggttttatgaaaccagttaacagtcttcctccaaggtctctgcttcagtccctgcctccaggaaatgccctgcttgtgtttctgctctgacttcccccagtgatggaatgttaccatggaagataaaataaatctttcccacatcaaaaaaaaaa

SEQ ID NO: 300 - DNA, 230 bp, Mus musculus
  misc_feature (1)...(230): n = A,T,C or G
tatcccgggctaattttagaagaagaagaagaagaagaagaagaagaagaagangaagaagaagaagaanacgangaagaggacgnncangangncgnaganggaacnagagctaccatgcaggcggcgggacctggactcnggacctccaaaacagcagccaatgctcccaaccactgagccatccctccagccccccctttttttttaaataaagggattttaactaa

SEQ ID NO: 301 - DNA, 303 bp, Mus musculus
  misc_feature (1)...(303): n = A,T,C or G
ttccaagactgccctttgggattcaaacgggagccgctttggactgactggctgccttcctcctcctccccctcctcccccttctgcttcagatttatttattatatgtaagtacactgtagcagttgtaggacacactagacgagggcaccagatctcattgtnggnggttgtgaaccacccaccatgtggttgctgggatttgaactcaggatcttcagaagagcagncagggctctaaaccgctgagccatctctccagcctcctgcattccttcttaaggcatgaatgatcccagcata

SEQ ID NO: 302 - DNA, 179 bp, Mus musculus
  misc_feature (1)...(179): n = A,T,C or G
ggggcctgtggggagaagagaaggtttcaccatgtatccctccctggctgggctggaactcactatgtagaccagaccagactccagctcattctgcctctacttcccaaatgctgatattaaaggcatgtgccgtcactccccgcaaaaaactttnctattttaattgaggtatattt

SEQ ID NO: 303 - DNA, 316 bp, Mus musculus
  misc_feature (1)...(316): n = A,T,C or G
agatacctgtagcctccctcatccctgaagcaggctgatccagactttgaccttgctgccaccgagaaggaaattacctaaggtggagctttccaacctagatggctcttttgttctgccacctgccactgctctctccaagacactgctacccgctgagaagcccctgagatattccggaggagcatcctattctgcccatcgcctacaggctggttccagacaccaagaatgggctggcggggggggggatgggccttccccttttataagtanactctnttagtaaactggngggccttgaacagaaaaaaaa

SEQ ID NO: 304 - DNA, 297 bp, Mus musculus
  misc_feature (1)...(297): n = A,T,C or G
gaagaaaactgcagggactgtcgagcantttagggatcctgaagaaaatagccacttcctccactccaagccgcttctctccagtttgagaggagagttacaagactcaaggaaggcagtttactacagtgaacacacaagatgacagatcgccagtgtggtagcacataccttaaatcccagccctcagaagacagaggcaggcagctctctgagttcgaggccagtctggcctacgtagtgagttccagagagccagagctacatagtgagaccctgtcttaaaaaattaaatta

SEQ ID NO: 305 - DNA, 413 bp, Mus musculus
  misc_feature (1)...(413): n = A,T,C or G
actggtccctactgtaacccgacaggacttnctgtgatgagagaggggcatnaacccacccacaaaaccttcaacccaaaatgtgttctgcctacaagatacacagggataaagatggagcagagattgaggggacggccaaccagngactgcctaactcgagacccatnccatgggagagagccaacccctgccactattgacactcggctatgcttgcagacagtgtgactccttgacaacagtgtgcctcgttatggttttatgaaaccagttaacagtcttcctccaaggtctctgcttcagtccctgcctccaggaaatgccctgcttgtgtttctgctctgacttcccccagtgatggaatgttaccatggaagataaaataaatctttcccacatcaaaaaaaaaa

SEQ ID NO: 306 - DNA, 191 bp, Mus musculus
  misc_feature (1)...(191): n = A,T,C or G
ttccagactgccctttgggattcaaacgggagccgctttggactgactggctgccttcctcctcctccccctcctcccccttctgcttcagatttatttattatatgtaagtacactgtagcagttgtaggacacactagacgagggcaccagatctcattgtgggtggttgngnaccacccaccatgtgg

SEQ ID NO: 307 - DNA, 209 bp, Mus musculus
aagacaagaaaccgccgccaaggttgacatcaagatagcctggaactgatggttgtgagctgtcacatggagaatcgaaattgaacctgggtcctctggaagggcaaccaatatccttaactgctgagctatttctccagccccttccaccatcggttctcttggcagagaaaacaagagaaaaaggacactatggaaaaataaagaaa

SEQ ID NO: 308 - DNA, 153 bp, Mus musculus
gccaggcatgggtggtacatgcctttaatctccgcacttgggaggcacgagacacgatggatctctgtgagttcaaggccagcctcgtctacagagagagttccaagacagctagggatacagagaaaaacccagtcttgaaaaaaaaaatca

SEQ ID NO: 309 - DNA, 168 bp, Mus musculus
ggtcagctgcctttggattcaacgggagccgctttggactgactggctgccttcctcctcctccccctcctcccccttctgcttcagatttatttattatatgtaagtacactgtagcagttgtaggacacactagacgagggcacacagatctcattgtgggtggtt

SEQ ID NO: 310 - DNA, 338 bp, Mus musculus
gaaggttagagtccatgatggtaaagcaagggaacagctgagtgtaacctcccccagcctgaagctggccgagccagacctcgactttgctgccactaaggagattacctaagatggagcctccctagatcactctattgttcagccactgttgctgttcttcttcaagatactgctacctgctggaaggctgccgaactattccagagaccacaccctatcctgcatgtggtcacctgcagctgggctccaaggatgaattggctggaatgggcctccctctcctttataagcgcattcgccattaaacatttgagccttgaacggaaaaaaaaaaa

SEQ ID NO: 311 - DNA, 240 bp, Mus musculus
gagctttgcctgtgtgtatatatagtacactgtatgtacaccatgtcatgagcctccatggtcgtgagaggactttggatcccttggaactggcgttacattggtcgtgagcctccatgttggcgctgagaagcaaacctgggttctctggaagcgcagcaagtgctcttaaccatcgagccatctctccatctcaaaccacccatgtatataaaatgaaaatacataaaccaaaaaaaa

SEQ ID NO: 312 - DNA, 284 bp, Mus musculus
ggtgtctcggaacaaggtttctctgtgtagttctggctgtcctagaactcagagatccacctacctctgattcaaaggactaggattaaatgcccggttaaagaagatactccagggctggagagatggctcagtggttcagatcacagactgctcgtccagaggtcctgagttcaattcccagcaaccacaaggtggctcacaacacctcttctggtgtgtctaaagacagcaacagtgtattcatgtacattaaatgaataaataaattgtaaaaaaaaaaa

SEQ ID NO: 313 - DNA, 400 bp, Mus musculus
  misc_feature (1)...(400): n = A,T,C or G
gactgggacctactgtaaccagacnggacttnctgtgaagagagaggggcatnaacccacccacaaaaccttcaacccaaaatgtgttctgcctacaagatacacagggataaagatggagcagagattgaggggacggccaaccagtgactgnctaactcgagacccatcccatgggagagagccaacccctgccactattgacactcggctatgcttgcagacagtgtgactccttgacaacagtgtgcctcgttatggttttatgaaaccagttaacagtcttcctccaaggtctctgcttcagtccctgcctncaggaaatgccctgcttgtgtttctgctctgacttcccccagtgatggaatgttaccatggaagataaaataaatctttccca

SEQ ID NO: 314 - DNA, 341 bp, Mus musculus
gctcctgggatcctgggccttcaacttctactgaggctgaaccttctccagtggcttaccctgtcctctcacagtgccaagcctcagctgctcttcatgactctccatgcttccaaaactgatatcaactgggtgagtcttacggtaccacgttcatatgccagtgcaaggtacaaccgtgaccagctatggagcccagctgtaagccaactcaaatacttcccaagctacacctcagtgatgctagtttctcctcaattattgttaatttcttagcttcagctgaccagcatcaatggtcccagtaaaataaaggctttccttcagtgataaaaaaaaaa

SEQ ID NO: 315 - DNA, 306 bp, Mus musculus
  misc_feature (1)...(306): n = A,T,C or G
ctggaccaactgaggcccatnccagccagccctcccaggacagacatatcgccgtctatcatggaaggaagtgaggcactcagctcaggaactcaaggcaggaacctgngggcangagctggtgcagaggccaccgaggagggctgctgactggcgtgacttactcagcttctttctctgaccatctagggccacctgcctgtggatgacatcacttacagggggcttggccccttccacatnaatcattnantcaagaaaatgcnccacnggcttagctcacangcatattttacaggggccttt

SEQ ID NO: 316 - DNA, 247 bp, Mus musculus
ggccttgtttggaagagatgatcaataactacaatgagctaagcacgaagtttaagatcaatgtactggggctggtgagatagctcagtgggtaagagcacccgactgctcttgctaaggtccggagttcaaatcccagcaagcacatggtggctcacaaccatccgtaacaagatctgactccctcttctggagtgtctgaagacagctacagcgtacttacatataataaataaataaataaaaa

SEQ ID NO: 317 - DNA, 259 bp, Mus musculus
acgattgctgccaggctatgggtgtcccaggtactgacaggaccacaccattgctgtctttaagaaacttgctgggggctggcgagatggctcagtggttaagagcatcaactgcttttccgaaggtcccgagttcaaatcccagcaaccacatggtggctcacaaccacccgtaaagaaatctgatgccttcttctggaagatctgaggacagctacagtgtacttacatataataaataaatctttaaaaaaaaaaa

SEQ ID NO: 318 - DNA, 244 bp, Mus musculus
  misc_feature (1)...(244): n = A,T,C or G
ttccagatgttcagantncaggagcaagagagatggcctaggggatcaaagccctgactgctcttccaaaggacctgggtttgattcccagcacccatatggcagntnccngntctctgaangtccagttccaggggacgcgacgacaccttcttctgagcactgcatgcacctgttatggagtcatacactcgggcatgacaccctatagacatagtaaaattaagaatgcagaaaaaaaaaa

SEQ ID NO: 319 - DNA, 189 bp, Mus musculus
  misc_feature (1)...(189): n = A,T,C or G
caagactgccctttgggattcaaacgggagccgctttggactgactggctgccttcctcctcctccccctcctcccccttctgcttcagatttatttattatatgtaagtacactgtagcagttgtaggacacactagacgagggcaccagatctcattgtgggtggttgngaaccacccaccatgtgg

SEQ ID NO: 320 - DNA, 243 bp, Mus musculus
  misc_feature (1)...(243): n = A,T,C or G
ggtgcacgtgcagaatatataccatgtgcatgtcctgtgccagaagagcctagaagagggcatctgatctcctggaactggcaacagacacttgtgagacatcatgtgggtgctacgaactgaacctgggtcctctgcaagagcaacaagcatttttaaccactgagccttccatcttattctctcaaagaaattattgtatgtatatatgcatggngtatgtgttttggagcatgtatgctg

SEQ ID NO: 321 - DNA, 178 bp, Mus musculus
gggttccagactgccctttgggattcaaacgggagccgctttggactgactggctgccttcctcctcctccccctcctcccccttctgcttcagatttatttattatatgtaagtacactgtagcagttgtaggacacactagacgagggcaccagatctcattgtgggtggttgaga

SEQ ID NO: 322 - DNA, 369 bp, Mus musculus
agactggaacttggaatccaggtcttcacaagcacgaggcaaaaactcaaccattgtcttccagccctggctgtcctggaactactctctctggagaccaggttggccttgaattcagagatccacctgcctctgcctcctgagtgctgggatttgggctctcttctgttttaagagacagcatctcattatggcagccaggctggctttgaaatcctagctcaagtcaccatcctccttcagcctctgagtgcccgggtgagcctgcagtagctcatcgggcatggcttctttggtaaagtctaagcttgcaatctgtcatcagctttgctaagtttcaagtaaagatcaaaacgatgaaaaaaaaaa

SEQ ID NO: 323 - DNA, 256 bp, Mus musculus; identical to SEQ ID NO: 211

SEQ ID NO: 324 - DNA, 261 bp, Mus musculus
ggtactatgtgcatgtggcacacattcatatatactgaagatagaacgtacacctaggataaaaaagtaaatgttctggtgagatggctcagtgggtaagagcacctgactgctcttccgaaggtcaggagttcaaatcccagcaaccacatggtggctcacaaccatccgtaacaagatctgactccctcttctggagtgtctgaagacagctacagtgtacttacatataatcaataaataaatctttaaaaaaaaaaa

SEQ ID NO: 325 - DNA, 410 bp, Mus musculus
  misc_feature (1)...(410): n = A,T,C or G
ataccagcaaccaatatccacgtcaccagcnatccaacaatccaccaacccagccatccagccatccacgaacccagccatccagccatccagcaaaccagccatccagccatccagccatccaccaacccagccatccagccatccagcaacccagccatccagccatccagcaacccagccatccagccatccagcaatagcaaaagcagcaaatgcagcagcagggaccaacagcagggggagcagtagcccccgccccaggctctctgggagctcttgaatttataccctctcaagagtccccagaattccaaatgcaaactatctgcaggtggcaaaaatcatagttagcagccctgtatcccacacctgagattaaagcaaaaacataatcacataaaaaaaaa

SEQ ID NO: 326 - DNA, 247 bp, Mus musculus
aggccttgtttggaagagatgatcaataactacaatgagctaagcagaagtttaagatcaatgtactggggctggtgagatagctcagtgggtaagagcacccgactgctcttgctaaggtccggagttcaaatcccagcaagcacatggtggctcacaaccatccgtaacaagatctgactccctcttctggagtgtctgaagacagctacagcgtacttacatataataaataaataaataaaaa

SEQ ID NO: 327 - DNA, 290 bp, Mus musculus
  misc_feature (1)...(290): n = A,T,C or G
aaacgggagctcgctttggactgactggctgccttcctcctcctccccctcctcccccttctgcttcagatttatttattatatgtaagtacactgtagcagttgtaggacacactagacgagggcaccagatctcattgtgggtggttgtgaaccacccaccatgtggntgctgggatttgaactcaggatcttcagaagagcagtcagggctctaaaccgctgagccatctctccancctcctgcattccttcttaangcatgaatgatcccagcataggaagacagc

SEQ ID NO: 328 - DNA, 202 bp, Mus musculus
  misc_feature (1)...(202): n = A,T,C or G
tggggtctttcagaagctanaagaggaactggagttacatgacaattgtggaccaccatgcaggtcctgggaattgaaccagggtccgttagaagaacagccagtgctcttatctgctgaaccatctctccagctcctgggcttaactgctgagctctctttagcccttggactttttttttcttaattaaaaaacaaacaa

SEQ ID NO: 329 - DNA, 417 bp, Mus musculus
gagttggtgttaccagaccccaaattctcatcactctgtaacacctgagaatgaagaccaggacacaagcacagactgactccctctcagacacgtgtggaagagacagctagcatcttcttaaaaggagcatgggggagggggagtttacattgtgtatgatttattaggcttgccaaatgctttaaagttcaattcagccaaatgaattaaaaatgagtggtttggagctggagagatggctcagcagttaagggcactgactgctcttccagaagtcctgagttcaattcccagcaaccacatggtggctcacaaccatctgtaatgggatttgatgccctcttctggtgtgtctgaagacagcgacagtgtattcacatacattaaataaataaataaataaatctttaaaaa

SEQ ID NO: 330 - DNA, 285 bp, Mus musculus
  misc_feature (1)...(285): n = A,T,C or G
tcaggaagcctggactgnccttgaactcactggatacccaaggatggcactgaacttctcatccttctaattcccaagtgttaagatttcaggtatgggctggtgagatggctcagtgggtaagagcgcccgactgctcttccgaaggtctgaagttcaaatcccagcaaccacatggtggctcacaaccatctgtaacaagatctgacgccctcttctggagtgtctgaagacagctacagtgtacttacatataataaataaataaatctttaaaaaaaaaaa

SEQ ID NO: 331 - DNA, 352 bp, Mus musculus
agcagagagagactgaccaacagactcacaggggcttggtacaaaggtgctgcacgatcgacccagtagaactcctgacaccagaagccagtctcacaagtccagtgactaaagcccacagaccacaggctcaatgatcttgtacacaaggaagaacccagcaggtctcgtgcagaacaagtaaaaactgggtccggagagatggctcagtggttaagagcactgactgctcttccagaggtcctgagttcaattgctaggaattgatgcactcttctggtgtatgtctgaagacagctacagtgtattcatataaacataaataaataaataaataaataaataaataaat

SEQ ID NO: 332 - DNA, 415 bp, Mus musculus
  misc_feature (1)...(415): n = A,T,C or G
actggtcacctactgtagccngacaggacttnctgtgaagagagaggggcatcaacccanccacaaaaccttnancccaaaatgtgttctgcctacaagatacacagggataaagatggagcagagattgaggggacggccaaccagtgactgcctaactcgagacccatcccatgggagagagccaacccctgccactattgacactcggctatgcttgcagacagtgtgactccttgacaacagtgtgcctcgttatggttttatgaaaccagttaacagtcttcctccaaggtctctgcttcagtccctgcctccaggaaatgccctgcttgtgtttctgctctgacttnccccngtgaaggganngttnccatggangataaaataaatctttcccacatcaaaaaaaaaa

SEQ ID NO: 333 - DNA, 247 bp, Mus musculus; identical to SEQ ID NO: 316

SEQ ID NO: 334 - DNA, 257 bp, Mus musculus
  misc_feature (1)...(257): n = A,T,C or G
agatgctgccaggctatgggtgtnccaggtnctgacaggaccacaccattgctgtctttaagaaacttgctgggggctggcgagatggctcagtggttaagagcatcaactgcttttccgaaggtcccgagttcaaatcccagcaaccacatggtggctcacaaccacccgtaaagaaatctgatgccttcttctggaagatctgaggacagctacagtgtacttacatataataaataaatctttaaaaaaaaaaa

SEQ ID NO: 335 - DNA, 253 bp, Mus musculus
agactcccccagccctgaagcaggttgattcagacttgacctcgctgccgctgagcatgagaccacctggggtggagccttccgacctagccggctctattgttctgtcacctgctgctgctcgtctccaagacactgctacctgctgaaaggcccttgagataatctggagacagcatccagccgatcacctactggctggcgaagggcaccaagaatggattgtttggggggggcgggggaggaatggtgg

SEQ ID NO: 336 - DNA, 444 bp, Mus musculus
  misc_feature (1)...(444): n = A,T,C or G
ggtgtttgctgcatgtgaatagaggtgcccatggagaccagagacgtcagatcctgtggagctggagtcacaaacgcctgtaagccacctgatgaggctctgtgtcctcatcctctggacaagcagcccgtgagcttaaccactgagctatttctccagcccctggaccagactgtcctccaccctgacctccacctttttttaaaaaaagatttattatatgtaagttcgctgtagctgncatcagacactccagaaagagggagtcagatctccttatggatggttgtaagctaccatatggttgctgggatttgaactcaggaccttgggaanagcagttgagtgctcttacccactgagccatctcactagcccctgacctcctccttctttaacctcctaattgctgggactaccgntgtgtgctaccacacctggctg

SEQ ID NO: 337 - DNA, 414 bp, Mus musculus
  misc_feature (1)...(414): n = A,T,C or G
gactgggacctactgtnaccngacaggacttcctgtgaagagagaggggcatcaacccacccacaaaaccttcaacccaaaatgtgttctgcctacaagatacacagggatnaagatggagcagagattgaggggacggccaancagngactgnctaactcgagacccatnccatgggagagagccaacccctgccactattgacactnggctatgcttgcagacagtgtgactccttgacaacagtgtgcctcgttatggttttatgaaaccagttaacagtcttcctccaaggtctctgcttcagtccctgcctccaggaaatgccctgcttgtgtttctgctctgacttcccccagtgatggaatgttaccatggaagataaaataaatctttcccacatcaaaaaaaaaa

SEQ ID NO: 338 - DNA, 365 bp, Mus musculus
  misc_feature (1)...(365): n = A,T,C or G
catcaacccacccacaaaaccttcaacccaaaatgtgttctgcctacntgatacncangnatanngatggagcatagattgaggggacggccaaccagtgactgcctaactcgagacccatnccatgggagagagccaacccctgccactattgacactcggctatgcttgcagacagtgtgactccttgacaacagtgtgcctcgttatggttttatgaaaccagttaacagtcttcctccaaggtctctgcttcagtccctgcctccaggaaatgccctgcttgtgtttctgctctgacttcccccagtgatggaatgttaccatggaagataaaataaatctttcccacatcaaaaaaaaaa

SEQ ID NO: 339 - DNA, 347 bp, Mus musculus
  misc_feature (1)...(347): n = A,T,C or G
atgtaacctaggtccttatcaatgtctaggtcaaacactgggtctacagtctctatcacaagtacttccgggatccaaacattcttcanctgtgnatgtcaaaccttttgcctgtgcaacattcatctgtaactgtacttgcatcgcccccacgggtactgtaggtataaggnagtagccgtatgtgtaacataaaacttgttgctctacacctacgctgcggaccctttaattcagtccctcatggtgtggcaacccgaaccagaacattcttttcattgctacttcatagctgtaattttgctactgttacgatttataatgtaaatatatgtttttctgtggtg

SEQ ID NO: 340 - DNA, 238 bp, Mus musculus; identical to SEQ ID NO: 222

SEQ ID NO: 341 - DNA, 237 bp, Mus musculus
  misc_feature (1)...(237): n = A,T,C or G
taaacaccttgattcagacttgacctcgctgccgctgagcatgagaccacctggggtggagccttccgacctagccggctctattgttctgtcacctgctgctgctcgtcnccaagacactgctacctgctgaaaggcccttgagataatctggagacagcatccagccgatcacctactggctggcgaagggcaccaagaatggattgtttggggggggcgggggaggaatggtgg

SEQ ID NO: 342 - DNA, 248 bp, Mus musculus; identical to SEQ ID NO: 177

SEQ ID NO: 343 - DNA, 388 bp, Mus musculus
  misc_feature (1)...(388): n = A,T,C or G
tactgtaaccagacaggacttnctgtgaagagagaggggcatcaacccacccacaaaaccttcaacccaaaatgtgttctgcctacaagatacacagggataaagatggagcagagattgaggggacggccaaccagtgactgcctaactcgagacccatcccatgggagagagccaacccctgccactattgacactcggctatgcttgcagacagtgtgactccttgacaacagtgtgcctcgttatggttttatgaaaccagttaacagtcttcctccaaggtctctgcttcagtccctgcctccaggaaatgccctgcttgtgtttctgctctgacttcccccagtggatggaatgttaccatgggaaagattataataaaatc

SEQ ID NO: 344 - DNA, 165 bp, Mus musculus
ctgccctttgggattcaaacgggagccgctttggactgactggctgccttcctcctcctccccctcctcccccttctgcttcagatttatttattatatgtaagtacactgtagcagttgtaggacacactagacgagggcaccagatctcattgtgggtggttg

SEQ ID NO: 345 - DNA, 114 bp, Mus musculus
  misc_feature (1)...(114): n = A,T,C or G
cctttgggattcaaacgggagccgctttggactgactggctgncttcctcctcctccccctcctcccccttctgcttcagatttattnattatatgtaagtacactgtagcagt

SEQ ID NO: 346 - DNA, 414 bp, Mus musculus
actggtcacctactgtaaccagacaggacttcctgtgaagagagaggggcatcaacccacccacaaaaccttcaacccaaaatgtgttctgcctacaagatacacagggataaagatggagcagagattgaggggacggccaaccagtgactgcctaactcgagacccatcccatgggagagagccaacccctgccactattgacactcggctatgcttgcagacagtgtgactccttgacaacagtgtgcctcgttatggttttatgaaaccagttaacagtcttcctccaaggtctctgcttcagtccctgcctccaggaaatgccctgcttgtgtttctgctctgacttcccccagtgatggaatgttaccatggaagataaaataaatctttcccacatcaaaaaaaaaa

SEQ ID NO: 347 - DNA, 317 bp, Mus musculus
  misc_feature (1)...(317): n = A,T,C or G
gctgcatgtgaatagaggtgcccatggagaccagagacgtcatgatcctgtggagctggagtcacaaacgcctgtaagccacctgatgaggctctgtgtcctcatcctctggacaagcagcccgtgagcttaaccactgagctatttctccagcccctggaccagactgtcctccaccctgacctccacctttttttaaaaaaagatttattatatgtaagttcgctgtagctgtcatcagacactccagaaagagggagtcagatctccttatggatggttgtaagctaccatatggntgctgggatttgaactca

SEQ ID NO: 348 - DNA, 256 bp, Mus musculus
  misc_feature (1)...(256): n = A,T,C or G
ggggctggagagatggntctgcagttaanagcnctgactgctttcccanaggtcttgagttcantgtccccangcctcaggaactacntggcggcttacaaccatctgtgatgggatccaatgtcctctcctggtgtgtttgaagacagtgacagtatacagtgtacttacatatctcacacacatangntctttagaaaagtggnngtatgcatacacataaacacacatccacacgttgttaaataaataaaaa

SEQ ID NO: 349 - DNA, 405 bp, Mus musculus
  misc_feature (1)...(405): n = A,T,C or G
gactggtcacctactgtaaccagacaggacttcctgtgaagagagaggggcatcaacccacccacaaaaccttcaacccaaaatgtgttctgcctacaagatacacagggataaagatggagcagagattgaggggacggccaaccagtgactgcctaactcgagacccatcccatgggagagagccaacccctgccactattgacactcggctatgcttgcagacagtgtgactccttgacaacagtgtgcctcgttatggttttatgaaaccagttaacagtcttcctncaaggtctctgcttcagtccctgcctccaggaaatgccctgcttgngtttctgctctgacttcccccagtgatggaatgttaccatgggaagatnanataaatctttcccacat

SEQ ID NO: 350 - DNA, 243 bp, Mus musculus
  misc_feature (1)...(243): n = A,T,C or G
aacttgtctttgccgtagatggagaccattgcagaaaactacaacagatcacaatacggagttgtggaacccagactcaagcgtagcaactatttatgaaaaagatagctcaagaaaaaaaatttttgtttgagatagggtttctccatgtagccctggctgncctggaactcactctgnagaccangccagnctctggttnagagatntncccacctcttgnctcccaagagctggaattaa

SEQ ID NO: 351 - DNA, 392 bp, Mus musculus
  misc_feature (1)...(392): n = A,T,C or G
tctcatgtaacctggtaaccaggtctgccgtgtccagtcagtcctcacccatcgcctttctccatctgtcccccaaccccccacagtcactgtgtcaagtcgtgtgcagccgtacctggtctttttctgtggnacgctggtaatctgaacccagcatcctttgcatgcacagctgtagtctcccctctcctagcctgtaaacctgcttgctcaggggtggnagcttcctgctcattcgttctgccacgcccactgctgggaacctgcggagccacacacgtgcacctttctactggaccagagattattcggcgggaatcgggtcccctcccccttccttcataactagtgtcgcaacaataaaatttgagccttggatcagaaaaaaaaaa

SEQ ID NO: 352 - DNA, 218 bp, Mus musculus
  misc_feature (1)...(218): n = A,T,C or G
gggttccagactgccctttgggattcaaacgggagccgctttggactgactggctgccttcctcctcctccccctcctcccccttctgcttcagatttatttattatatgtaagtacactgtagcagttgtaggacacactagacgagggcaccagatctcattgtgggtggttgtgaaccacccaccatgtggttgctgngatttgaactcaggatc

SEQ ID NO: 353 - DNA, 347 bp, Mus musculus
  misc_feature (1)...(347): n = A,T,C or G
ggtttccaaatgcctttccagcctagaacccaaacatgtacgncggctggccggacacaacagagaccctcctcctagctgcctagaagccagncttntcctgnctgcctttggaacaagtagaactctnanctcctccanngctgtgcctgcctggatgctgccatgcttnccaccacgatgataattgactgaatcccagaagctgtanaccagccccaataaatgtcttttataagagctaccttggtaggggnttgagagatggctcancagntaagagcactgactgctcttaantctgagctntattcctagcaaccacatggtggctcacaaccatctgt

SEQ ID NO: 354 - DNA, 436 bp, Mus musculus
  misc_feature (1)...(436): n = A,T,C or G
gctggctagagatctgttanaccagtcaaaccaacaaccaataaccagtcaccagcaatccaacaatccaccaacccagccatccagccatccaccaacccagccatccagccatccagcaaaccagccatccagccatccagccatccaccaacccagccatccagccatccagcaacccagccatccagccatccagcaacccagccatccagccatccagcaatagcaaaagcagcaaatgcagcagcagggaccaacagcagggggagcagtagcccccgccccaggctctctgggagctcttgaatttataccctctcaagagtccccagaattccaaatgcaaactatctgcaggtggcaaaaatcatagttagcagccctgtatcccacacctgagattaaagcaaaaacataatcacataaaaaaaaa

SEQ ID NO: 355 - DNA, 243 bp, Mus musculus
ctgtggggagaagagaaggtttcaccatgtatccctccctggctgggctggaactcactatgtagaccagaccagactccagctcattctgcctctacttcccaaatgctgatattaaaggcatgtgccgtcactccccgcaaaaaacttttctattttaattgaggtatatttcacaaacaaaaaatgtaaaccttcaagatctataataaaaattaaacaaacacttcatcaaaaaaaaaa

SEQ ID NO: 356 - DNA, 231 bp, Mus musculus
cttttaaacaggcgcacagttactcattatccctctgtcccgttgagatatatatgcatatgtcttctacaagccagaaatgttttcctccaggacagaaagcccttcctttgaaatgtaaatcatcaaaaaattttggcgtctgtttcccattttgtgtgggaagatataatcccatcttctataattgccaactagtaaattgtaattgcttttacaatgaaaaaaaaa

SEQ ID NO: 357 - DNA, 239 bp, Mus musculus; identical to SEQ ID NO: 231

SEQ ID NO: 358 - DNA, 254 bp, Mus musculus
  misc_feature (1)...(254): n = A,T,C or G
cactgtaacttctcatccttctaattcccaagtgttaagatttcaggatatgggctggtgtagaatggnctcagtgggttaagtagcgcccgtactgtctcttccgtaaggttctgtaagttcaaatcccagcaaccacatggtggctcacaaccnatctgtaacaagnatctgacgccctcttctggtagtgtctgaaggacagctacagtgtacttacatataataaataaataaatctttaaaaaaaaaaa

SEQ ID NO: 359 - DNA, 190 bp, Mus musculus
  misc_feature (1)...(190): n = A,T,C or G
ttgaagatgactttgttttgaagagttncaaggnnngatggtatcctgggttctanaagaaagcanactgatcnagtcatgtgagccaacnaggaagcagnactcctccgtgacctcagcactagnnccngcttntgggttnctgccctgttagagtncctgttctaactancttcgattctgaactgca

SEQ ID NO: 360 - DNA, 217 bp, Mus musculus
  misc_feature (1)...(217): n = A,T,C or G
agagaggaatggctcagtgattaagaagattctctgctcttccagagggctggttcaattttnagnacccaaatggtggntttccatcacccgtggcttnagttccagatctgatgcattctggcctccttgggcatcaggcatgcgcattgcatacacatatacacacaggcaaaacacataataataaacattcacttctctcagaaaaaaaaaa

SEQ ID NO: 361 - DNA, 198 bp, Mus musculus
aagaacacgctccccctggctgcccgaggaatagacttctgctgcctttggatcagcgcaagatgtactaactcttggctcctccaataccatgtctgcctgcaagctgccacgcttccccccatgatgataatggactgaacctctgaaactgtaagccagtctcaattaaatgtcttctaagggtaaaaaaaaaaa

SEQ ID NO: 362 - DNA, 409 bp, Mus musculus
  misc_feature (1)...(409): n = A,T,C or G
ccagcaaaccaacaaccaataaccangtcaccancaatccaacaatccaccaacccagccatccagccatccaccaacccagccatccagccatccagcaaaccagccatccagccatccagccatccaccaacccagccatccagccatccagcaacccagccatccagccatccagcaacccagccatccagccatccagcaatagcaaaagcagcaaatgcagcagcagggaccaacagcagggggagcagtagcccccgccccaggctctctgggagctcttgaatttataccctctcaagagtccccagaattccaaatgcaaactatctgcaggtggcaaaaatnattggttggcagccctgnatcccacacctgngattaaagcaaaaacataatcacataa

SEQ ID NO: 363 - DNA, 256 bp, Mus musculus
ttaagcctcccccagccctgaagcaggttgattcagacttgacctcgctgccgctgagcatgagaccacctggggtggagccttccgacctagccggctctattgttctgtcacctgctgctgctcgtctccaagacactgctacctgctgaaaggcccttgagataatctggagacagcatccagccgatcacctactggctggcgaagggcaccaagaatggattgtttggggggggcgggggaggaatggtgg

SEQ ID NO: 364 - DNA, 249 bp, Mus musculus
aggggcctgtggggagaagagaaggtttcaccatgtatccctccctggctgggctggaactcactatgtagaccagaccagactccagctcattctgcctctacttcccaaatgctgatattaaaggcatgtgccgtcactccccgcaaaaaacttttctattttaattgaggtatatttcacaaacaaaaaatgtaaaccttcaagatctataataaaaattaaacaaacacttcatcaaaaaaaaaa

SEQ ID NO: 365 - DNA, 251 bp, Mus musculus
tggctgtcctagaactcagagatccacctacctctgattcaaaggactaggattaaatgcccggttaaagaagatactccagggctggagagatggctcagtggttcagatcacagactgctcgtccagaggtcctgagttcaattcccagcaaccacaaggtggctcacaacacctcttctggtgtgtctaaagacagcaacagtgtattcatgtacattaaatgaataaataaattgtaaaaaaaaaaa

SEQ ID NO: 366 - DNA, 361 bp, Mus musculus
  misc_feature (1)...(361): n = A,T,C or G
ccaacccacaaaaccttcancccaaaatgngttntgcctacnngatacacnatggatntgagatggagcanagattgaggggacggccnancantgnctggctaactcgagacccntnccatgggagagagccaanccctgccantattgacactnggctatnctngnaaacagtgtgactccttnncaacagtgtgcctcgttatggttttatgaaaccagttaacagtcttcctccaaggtctctgcttcagtccctgcctccaggaaatgccctgcttgtgtttctgctctgacttcccccagtgatggaatgttaccatggaagataaaataaatctttcccacatcaaaaaaaaaa

SEQ ID NO: 367 - DNA, 406 bp, Mus musculus
  misc_feature (1)...(406): n = A,T,C or G
ttaagagtgaattagatataatgttggtcacctactgtaaccngacaggacttnctgtgaagagagaggggcatcaacccacccacaaaaccttcaacccaaaatgtgttctgcctacaagatacacagggataaagatggagcagagattgaggggacggccaaccagtgactgcctaactcgagacccatcccatgggagagagccaacccctgccactattgacactcggctatgcttgcagacagtgtgactccttgacaacagtgtgcctcgttatggttttatgaaaccagttaacagtcttcctccaaggtctctgcttcagtccctgcctccaggaaatgccctgcttgtgtttctgctctgacttcccccagtgatggaatgttaccattggaagat

SEQ ID NO: 368 - DNA, 322 bp, Mus musculus
  misc_feature (1)...(322): n = A,T,C or G
tgcccagatgttcacatttaggaagcctgtctccacatccctaggactatcccactgtcactgcctcanaagcctggtctccagagtcgactggtgtagtcccccctccctcagcctgaaacctgcttgctcaggggtggagcttcccgctcaatcgttctgccacgcccactgctggaatctgccgctttgctgttcggagccgtgcacgaggtcacccagctattggattccaagattaattggcgggaatcgggccccttcccctgcttcataactgcgtgcggaacagtaaaattgagctttgatcagaaaaaaaaaa

SEQ ID NO: 369 - DNA, 428 bp, Mus musculus
ttgaagccagcagcccagcaaaccaacaaccaataaccagtcaccagcaatccaacaatccaccaacccagccatccagccatccaccaacccagccatccagccatccagcaaaccagccatccagccatccagccatccaccaacccagccatccagccatccagcaacccagccatccagccatccagcaacccagccatccagccatccagcaatagcaaaagcagcaaatgcagcagcagggaccaacagcagggggagcagtagcccccgccccaggctctctgggagctcttgaatttataccctctcaagagtccccagaattccaaatgcaaactatctgcaggtggcaaaaatcatagttagcagccctgtatcccacacctgagattaaagcaaaaacataatcacataaaaaaaaa

SEQ ID NO: 370 - DNA, 292 bp, Mus musculus
gcctcccccagcctgaagcagactgatgcaaaccttgctgcctctgagagtgagactacctggggtggagccttccgacctagatggctctattgttctgtcacctgcctctgctctcctccaagacactgctacctgctgagaggccccagagatattccggaggcacgtcctatcctacatatctcctacaggctggctccagacatcaagaatggactgggggcgggaggatgggtcttcccccttataagcacactctcttagtaaaccttgatcagagaaaaaaaaa

SEQ ID NO: 371 - DNA, 374 bp, Mus musculus
  misc_feature (1)...(374): n = A,T,C or G
gggtctatggtggagctctggctggactgaaactcagagatctgcctgtgccttccaagctctggaattaaaggtgtgccccaccacacccagctctatgggttttctgttttgtttccagacaggatttctgtttaacagccctggctgttctgaaactcactctgtaagataaggctggcctcaaattcacagagattcaactgcctttgcctcccgagtgctggaattaaaggtgtgtcccaccatgcctaccttcacggattcgttctttaaaatggggactgaagagctggctcaatggttaagagctgagtcaattcccagcaaccgngtggtggntnacaaccatctgtaatgggacctgatgccct

SEQ ID NO: 372 - DNA, 121 bp, Mus musculus
  misc_feature (1)...(121): n = A,T,C or G
gaagaagaagaaggaggaggaggaggaggaggaggaggaggagaanacattccaancgaaaaaccaagaggagacgcggcagctcccagatgttgatgttttgtttttttgacataaatct

SEQ ID NO: 373 - DNA, 337 bp, Mus musculus
aagcattaactgtggctggcttacagtttcagaggtttagttcgttattaccatggttggtgctggagaagtggctgagaggtctacatctgaatccacaagcatcaggaagaaagagtgaccgtgaacctggcttggatttttgatgcctcaaaacccaccccccaatgacacagtttctccaacaaggcctccaatgacacctactgcaacaaatagtgccattctctaaacactcaaatatatgagcctatgggaccgttcttactcaacccccacatatatgtatatgcacctatgttcccaaatataatctcttccactcataaaaaaaaaa

SEQ ID NO: 374 - DNA, 210 bp, Mus musculus
aggaaaagaaaccgccgccaaggttgacatcaagatacgcctggaactgatggttgtgagctgtcacatggagaatcgaaattgaacctgggtcctctggaagggcaaccaatatccttaactgctgagctatttctccagccccttccaccatcggttctcttggcagagaaaacaagagaaaaaggacactatggaaaaataaagaaa

SEQ ID NO: 375 - DNA, 382 bp, Mus musculus
cctactgtaaccagacaggacttcctgtgaagagagaggggcatcaacccacccacaaaaccttcaacccaaaatgtgttctgcctacaagatacacagggataaagatggagcagagattgaggggacggccaaccagtgactgcctaactcgagacccatcccatgggagagagccaacccctgccactattgacactcggctatgcttgcagacagtgtgactccttgacaacagtgtgcctcgttatggttttatgaaaccagttaacagtcttcctccaaggtctctgcttcagtccctgcctccaggaaatgccctgcttgtgtttctgctctgacttcccccagtgatggaatgttaccatggaagataaaataa

SEQ ID NO: 376 - DNA, 193 bp, Mus musculus
  misc_feature (1)...(193): n = A,T,C or G
gggtccagactgccctttgggattnaacgggagccgctttggactgactggctgccttcctcctcctccccctcctcccccttctgcttcagatttatttattatatgtaagtacactgtagcagttgtaggacacactagacgagggcaccagatctcattgtgggtgcgttgngaaccacccaccatgtgg

SEQ ID NO: 377 - DNA, 210 bp, Mus musculus
ggcactggtggggaccggagagatgtctcagaggctaagcctctcctgtccttgttgaggacctgaattcagttgccagcagctcacaaccagctggaactccagctccgggggatctgacaccctcttctgcccttctagaactaccatattcatgtgcacacactcatatacaaatcacttaaaatacaaataaacattctactaaag

SEQ ID NO: 378 - DNA, 242 bp, Mus musculus
tccccagccctgaagcaggttgattcagacttgacctcgctgccgctgagcatgagaccacctggggtggagccttccgacctagccggctctattgttctgtcacctgctgctgctcgtctccaagacactgctacctgctgaaaggcccttgagataatctggagacagcatccagccgatcacctactggctggcgaagggcaccaagaatggattgtttggggggggcgggggaggaa

SEQ ID NO: 379 - DNA, 223 bp, Mus musculus
  misc_feature (1)...(223): n = A,T,C or G
taaatgcttcctgtctcactgaaagtgcggtgaacacacacttcccatgggtatcactgtggtaaattgcagcatgggggctggtatanaagcatcagncggtgtaatagcactgtactgctcttccagtggatcctggagttcaattcccagcaacccacgtggtggntcacaaccatctttaatgggaacctgntgctttcttctggtgtgttcggaagaa

SEQ ID NO: 380 - DNA, 339 bp, Mus musculus
gactggtccctactgtaaccagacaggacttcctgtgaagagagaggggcatcaacccacccacaaaaccttcaacccaaaatgtgttctgcctacaagatacacagggataaagatggagcagagattgaggggacggccaaccagtgactgcctaactcgagacccatcccatgggagagagccaacccctgccactattgacactcggctatgcttgcagacagtgtgactccttgacaacagtgtgcctcgttatggttttatgaaaccagttaacagtcttcctccaaggtctctgcttcagtccctgcctccaggaaatgccctgcttgtgtt

SEQ ID NO: 381 - DNA, 250 bp, Mus musculus
agcctcccccagccctgaagcaggttgattcagacttgacctcgctgccgctgagcatgagaccacctggggtggagccttccgacctagccggctctattgttctgtcacctgctgctgctcgtctccaagacactgctacctgctgaaaggcccttgagataatctggagacagcatccagccgatcacctactggctggcgaagggcaccaagaatggattgtttggggggggcgggggaggaatgg

SEQ ID NO: 382 - DNA, 416 bp, Mus musculus; identical to SEQ ID NO: 162

SEQ ID NO: 383 - DNA, 125 bp, Mus musculus
  misc_feature (1)...(125): n = A,T,C or G
agctcaaatgtctggctgcagcacctgtggatgtcctgctgctatgaagcaaaacttanaaatggaaaccatgtgtgcagactgctggagagagagagagagagagagagagagagagagaaaaa

SEQ ID NO: 384 - DNA, 209 bp, Mus musculus
ctcagctacttctccagtgccacgcctgcctgcatgccgtcatgcttcccgtcatgatgataatggactaaacctctgaactgtaaaccagctgttgtgggtcacttttgctaccccgcctaagctccgggaatgggctgtgctaccagcccccacccagattccctcaaatccacagattaaaaaaaacacagacacacaaaaaaaaa

SEQ ID NO: 385 - DNA, 244 bp, Mus musculus
  misc_feature (1)...(244): n = A,T,C or G
gacgtataaacgactgaataaatgtttgtgcaccacgtgcctgcagtacctccagtggccagaaggtggcactggatctnctgaaactggaattccagatggttatgatctgccatgtgggtgctgcaaatagaacctgggtcctttgaaagagcacggatgcatcgctccataccctgtaatatattttcaaagatttgaaaaatgaaataacanatatattttaaatgctgaaaaaaaaaaa

SEQ ID NO: 386 - DNA, 256 bp, Mus musculus
attgctgccaggctatgggtgtcccaggtactgacaggaccacaccattgctgtctttaagaaacttgctgggggctggcgagatggctcagtggttaagagcatcaactgcttttccgaaggtcccgagttcaaatcccagcaaccacatggtggctcacaaccacccgtaaagaaatctgatgccttcttctggaagatctgaggacagctacagtgtacttacatataataaataaatctttaaaaaaaaaaa

SEQ ID NO: 387 - DNA, 319 bp, Mus musculus
gcccttgaaacagtacgtgtagcctcccccagcctgaagctggctgttgcaaaccttgctgctactgagaatgagaccacctggggtggagccttccgacctagatggctccattgttctgtcacttgccgctgctctcctccaagacactgctacctgctgagaggcccctgagatattccagaggcacatcctatcctgcacatcctcgcctgcaggctggctccaggcaccaagaatggattggcgggggatgggctttcccctttttaagcacagtctctgagtaaaatctcgggccttgatcagaaaaaaaaaa

SEQ ID NO: 388 - DNA, 243 bp, Mus musculus
tatataaacagtaagaactgctgaggagaacatgactatgcctgctgcctggaagagactcagacctgcctgaaggagagattctctgtcctgttgagctctccacaagtagtgtaatgaactccagggttcctgctcttggtgatgtagctatatttgagttgaccctgcccctgcccttgcccttttacttatattcttgtgaataactctaataaactcattggattaccaaaaaaaaaa

SEQ ID NO: 389 - DNA, 139 bp, Mus musculus
tcctgttctggccaccctgagaaagtgtgctgagaaccagaagaaaacaagagctgggtgtaacagcacttgggacgcagtgagttccaggctagcctgatctacatagagaaagcctaccaagagaagaaagaaaaaa

SEQ ID NO: 390 - DNA, 319 bp, Mus musculus
  misc_feature (1)...(319): n = A,T,C or G
cgcagtatccagcggtgtctgggatgcccaaaactgagaacctggtatntaggactgcccctcgtncaccacctgccgagctggggtctagnggcttcacacagccagacacccacccggagccacgtggaaaggcatgcaacagtctgcctgcccagagcactggaactctggtagagggggggttttctcccactccatntttcctccacacacactggcccacantnatccactganccttctcattggcncctaggtttccttaatacatgccctgnaacatgacagctttattttccaaattaaatctggaatt

SEQ ID NO: 391 - DNA, 203 bp, Mus musculus
  misc_feature (1)...(203): n = A,T,C or G
ggtgaagcactggtggaaggaaaagaacacgcaggagcgancagggactgagcnantggagttgaccggagcaagaagangtnctaaaaattnaattnccaacaaccacatgaaggctcacaaccatctgtacagctacaagtgtactcacatacataaaataatgaataactanctatttagaatgatatgtgaaataaagg

SEQ ID NO: 392 - DNA, 311 bp, Mus musculus
  misc_feature (1)...(311): n = A,T,C or G
tctgcatcattatctncattactctgtatcctccanagacaactantctnantcaaactgcacacnatgaagataanatgncnngagcaagaangagagggtgaaatcacacagcttnttcatgtctgctggatctaagatggagctgttgtgaaatccatttcttatgcaaacatcacacacacacatatctcagtctttgggagatcccagaggactgagttggttgagactgctgatcttcctatgggtatgccctccttttcagcttattaaattcttcccctgggtcaaacataggggatcctgaa

SEQ ID NO: 393 - DNA, 308 bp, Mus musculus
  misc_feature (1)...(308): n = A,T,C or G
ctgtggataaatagaggctacccagagaataaaanagctaaaacatcatctntagntnttccttttttttttaaatgaaaccaaaatggaanaatgntagcattntgnctaggctcctcccagcagttacctggcaacagccatgtatgcctgattcactataaagggagctgcttgcccccttntcactctnttancctcttactctttggcccttttccctttttncccctncccttncccctttccctttctgnctttntntntntntancccctcaagtnccctncccatgccctaaataaact

SEQ ID NO: 394 - DNA, 415 bp, Mus musculus
  misc_feature (1)...(415): n = A,T,C or G
gactgggacctactgtancccgacnggacttnctgtgattagagaggnncatnancccacccacaaaaccttcancccaaaatgtgttctgcctacaagatacacagggatnangatggagcagnagattgaggggacggccaancngngactggctaactcgagacccntnccatgggagagagccnacccctgccactattgacactnggctatgcttgcagacagtgtgactccttgacaacagtgtgcctcgttatggttttatgaaaccagttaacagtcttcctccaaggtctctgcttcagtccctgcctccaggaaatgccctgcttgtgtttctgctctgacttcccccagtgatggaatgttaccatggaagataaaataaatctttcccacatcaaaaaaaaaa

SEQ ID NO: 395 - DNA, 317 bp, Mus musculus
  misc_feature (1)...(317): n = A,T,C or G
gcctaccccagccctgaagcaggttgattcagacttgacctcgctgccgctgagcatgagaccacctggggtggagccttccgacctanccggctctattgttctgtcacctgctgctgctcgtctccaagacactgctacctgctgaaaggcccttgagataatctggagacagcatccagccgatcacctactggctggcgaagggcaccaagaatggattgtttggggggggcgggggaggaatggtgggatggtgatgggcggnccctctttataagtacagactcttagtaaactttggggccttgaacaga

SEQ ID NO: 396 - DNA, 250 bp, Mus musculus
  misc_feature (1)...(250): n = A,T,C or G
ataggatttctttgtcctggctgacctggaacttgttctgaagaccaggctgtcctggaactcacananatctgcctgcctctgttctgngagtgctgnaattaaaggaatgtaacacccaaananaaatttgaactggctgacctgnaacttgntctgaagaccaggctgtcctggaactcacagagatctgcctgcctntgntctgtgagtgctggaattaaaggaatgtaacacccaaaaaaaaaaa

SEQ ID NO: 397 - DNA, 176 bp, Mus musculus
gggttccagactgccctttgggattcaaacgggagccgctttggactgactggctgccttcctcctcctccccctcctcccccttctgcttcagatttatttattatatgtaagtacactgtagcagttgtaggacacactagaccgagggcaccagatctcattgtgggtggttg

SEQ ID NO: 398 - DNA, 419 bp, Mus musculus
  misc_feature (1)...(419): n = A,T,C or G
agactggtcacctactgtancccgacaggacttnctgtgatnagagaggggcatnaacccacccacaaaaccttcancccaaaatgtgttctgcctacangatacacagggatnaagatggagcagagattgaggggacggccaaccagngactgnctaactcgagacccatnccatgggagagagccaacccctgccactattgacactcggctatgcttgcagacagtgtgactccttgacaacagtgtgcctcgttatggttttatgaaaccagttaacagtcttcctccaaggtctctgcttcagtccctgcctccaggaaatgccctgcttgtgtttctgctctgacttcccccagtgatggaatgttaccatggaagatnaatnaatcttttccccatcaaaaaaaaaccaca

SEQ ID NO: 399 - DNA, 470 bp, Mus musculus
  misc_feature (1)...(470): n = A,T,C or G
ggtctcattttgttcctctggctgtcctggaactcattgtataaaccaagctggcctcaaactcacagagattttcttgcctctgcctcctaagtgctgggattaaagatgtgtgtcacccaccccccaccccccaatccctgagctctcccccagggactggaccaccaaccaaagaatacacatggagggaacaggctgcaaatgtgacagaggatgaccttgttgaacatctgatctaaagggaatggnagaagctnagaanaacatnctgtgatccctataatggcaaaaaaaaacccaataaancccttggacatnggtntttaaaagcccttnctccnggttctttctgcngaggggtaacnttngggctntggnaaanaancntcnnttcgatgactttaactacncnncgngttggantttttagcnttgtgagagatttcagctgacagctgtcttgagcc

SEQ ID NO: 400 - DNA, 153 bp, Mus musculus
  misc_feature (1)...(153): n = A,T,C or G
gcttagagtcgatctaaagaactacnnctaagcaggtccacantgcccttgtcctagtaaccgtatctatcccctacctctggtcggtgctctagaagggagattgatgcattgaagaaccccaaataaaataggctttgaaaaatcaaaaaa

SEQ ID NO: 401 - DNA, 223 bp, Mus musculus
  misc_feature (1)...(223): n = A,T,C or G
cgtgcacctttctactggaccagagattattcgtgcgggaatcgggtcccctcncccttccttnataantagcgtctgancantacnntntgagcctatgancatnaagacagatccctncgggacttaccacgcttggaaagcaantgcaatagggcgaagngctaaaactgtccgggaatttctggaaaaaaattacncanaagatgcaatttcaaatgac

SEQ ID NO: 402 - DNA, 692 bp, Mus musculus
  misc_feature (1)...(692): n = A,T,C or G
gataatgaggcctccgacattgagnncaggcaggtggatctctgtgagttctgggccagcctggtctacatagttagttctaggacaggcaagactacacagaaaccttatctggaaaaaacagaaatgttcagaattattctggcttaaggcttatgtctgttctacaaattcaattgtgaaaagttgcaatttaagagatagctggaagccgggcgtggtggcgcacgcctttaatcccaacactcgggaggcagaggcaggcggatttctgagttcgaggccagcctggtctacaaagtgagctccaggacagccagggctatatagagaaaccctgtctcgaaaaagcccccccaaaaaaaagagagagagagagatagctggtttattataaggagaaaagtagaaaaagtaatatttggaaaattttttaaatgaagaaaattgggctggagagatggctctgtagttaagagcactggctactgctcttctagaggtcatgggttcaattcccagcaaccacgtggtggctcacagccatctgtgatgggatccgatgccagtgaataaataaaggataaacattttgncttttttgntgntgatgctttatttttaagtttgaacccatgggattttttagctcattaatttagatgnatatggatgggatttttttttaaaaa

SEQ ID NO: 403 - DNA, 350 bp, Mus musculus
  misc_feature (1)...(350): n = A,T,C or G
gactatttaacaaactgcaatcaacagcaatcaacagctatgaaccagcaacctaccctgcctcttgggaccctagcatttatataccctctgaagagttcccagaattccagatgtcacactatcacagaaactatcctcagctggcaaaaaatcatacccctgctagagcatgaggcaaatcatagtcagctgctgtggacagactgaaccagccccataccacacctgggattaaaacaaaaacatgttcttatatnnctgnnantctttttctttttttgtagaacatgattttaatattttcaactgttaatattcaacaaacagaataattatttaagatatat

SEQ ID NO: 404 - DNA, 281 bp, Mus musculus
tctgcctttctgggagaaggaaaaagccaacaatttgaagaacgagataaaagaagtcgaggagcttgacaactggcagggactggggagatggctccacggttaaaggtgctcgctgctcttccagaaggaacaagttcagttctcagcacccaagggaggctcacaaccccctgtagttccagcatcagagggtctcaaaccctcttcctgcctcaccggacatcctctcatgtgttgcgtacatatacacgaacgttacatataaataaaaagcctta

SEQ ID NO: 405 - DNA, 317 bp, Mus musculus
ggtttctctgtgtagacctggctgtcctggaactcactctgtagaccaggctgatctcagaactcacagaactccacctgcctctgtctcctgaatgctgggtttaaagatgtgtgccactggggctggggagatagctctgtggttaagaatactggctgctctttcagaggacctgcattcagttttcagcaccacaaggcggctcacacctgtctgtaactccagttccagaggaattgacacccttggacagtcatgcaggcagaacaccagtacacacagaaataaataaatcatttttaaaaaggaaaaaa

SEQ ID NO: 406 - DNA, 349 bp, Mus musculus
  misc_feature (1)...(349): n = A,T,C or G
aacccggagataaagaagagccttcatgctgtgggttatgtgtagcttgacaccatatcccacgtgaggaaatgtgattgtcggagtggcattgacggatggtggctaggtcatggagggtgcctcacagtcttgcgcgcttcagactcnaccagcaagancgatgttgcaacaggatccttctgcacacgttnattgggagagcttgattgcataggtgaagagaccccgagcccagaactggngctgcttatataggcctaggagaggcgtgtntcacacccggantggntatgcnctaagcctcatttgcntgttccttatctgattggntactctctctctctgt

SEQ ID NO: 407 - DNA, 197 bp, Mus musculus
gtttttggcccttgacccaaggtagagttatttggggagaagctcaactgagaaagtgcctccatcagagtggccttgggcagcccctgtttcagtttctgcctccaggttcctgctttgagttcctgcccgacttcccctgaggatggacctgcgatccaaataaataaacaaattatccaccccaaaaaaaaaaa

SEQ ID NO: 408 - DNA, 402 bp, Mus musculus
  misc_feature (1)...(402): n = A,T,C or G
attacataactgaagaatgcgcggttgtgttgtggancaatgtangagagacagcaggctgacctggcggccaacctacttggcacactgcacttctaaataagaagcacggcacactgtgcccctgaaagtcagaacactgaattctcaagtagcggggctggagagatggctcancgggtaagagcacggactgntcttccagaggtcctgagttnaaatcccagcnaccacatggtggctcacaaccacccgtaatgagatctaacgccctcttctgaagcaagcgngtcctactggagtgagcanaggtcctaaattnaattcccaacaaccacatgaaggctcacaaccatctggactgngtactcatatacataaagtaaataaatctctgaagta

SEQ ID NO: 409 - DNA, 100 bp, Mus musculus
  misc_feature (1)...(100): n = A,T,C or G
aaccctgtgcaatatgcactgtgtgtgaagacagcagatcntagggaccttggagatcattcagcggaaacatgagaccacccccttcagagtatacaag

SEQ ID NO: 410 - DNA, 337 bp, Mus musculus
  misc_feature (1)...(337): n = A,T,C or G
caaattaagaaaggaaacggcaacattcggggaagttaccgagcctacccgcgtgcatnctgtgagagcagctccgttgaggcgcactcgaacagggctgttntgcaagacctntanaaaatagcangcgctgtacaagancctntgngaaatactgttttcatcaacagcctggctgcctgtgtctccattgtgagacatcactgaggcccagacagctcagtgatcaagagctctgccagaggtcccaagttcaactcccagcaaccacatggtagctcacaaccatntttaatggggaacccgangtcctcttctgatgtgtctaaagacagct

SEQ ID NO: 411 - DNA, 331 bp, Mus musculus
  misc_feature (1)...(331): n = A,T,C or G
cttacatgcctccctgaggttattaaattggncgcctgtgacaagatagcaaggagggatnntgaactttatacaaacgaatcgtagggctggagagatggctcagcagttttgatggctcagcagttttgagcagtggatgctgttccggaggacctgagttcagttcccagcccccacatggtggctcacaaccttcagtaactccagttccaggagatctggtgccctgttctgacatctgctggcaccaggtagatatgtggtgcacagacggtatatgcagccagtgcaccgtacacataaaataaaaattggaaaactgggaaaa

SEQ ID NO: 412 - DNA, 243 bp, Mus musculus
gttatataaacagtaagaactgctgaggagaacagactagcctgctgcctggaagagactcagacctgcctgaaggagagattctctgtcctgttgagctctccacaagtagtgtaatgaactccagggttcctgctcttggtgatgtagctatatttgagttgaccctgcccctgcccttgcccttttacttatattcttgtgaataactctaataaactcattggattaccaaaaaaaaaa

SEQ ID NO: 413 - DNA, 335 bp, Mus musculus
  misc_feature (1)...(335): n = A,T,C or G
cattgaggactgcggnaagccctgtgggcccatcctctgctccatcaacaccgacnagaaggagtgggctaagtggacgaaggaggaactcatcgggcagctgaagcccatgtggaggagatgtagtctcccctcccctagcctgaaacctgcttgctcggggtggagcttcctgctcattcgttctgccacgcccactgctggaacctgaggagccacacacgtgcacctttctactggacccgagattattcggcgggaatcgggtcccctcccccttccttcataactagtgtcgcaacaataaaatttgagccttgatcagaaaaaaaaaa

SEQ ID NO: 414 - DNA, 422 bp, Mus musculus
  misc_feature (1)...(422): n = A,T,C or G
tggctatgaagctcaagctggctncagacctgatnctcatagggggctgganagatggctgagtggntaagggcactggctgctcttncagaagactccngttcanttnncagcacnnacatggcanntcacagatgtctgtaacagtttgaggggatccantgccatcttctggcctncatgcaagcaagtgacntacaagcatcgngccagcaaaacatccatgctaagagaatacttttagggctggagagatggctcagcggataagagcactgactgctcttccagaggtcctgagttcaattcccagcaaccacatggtggctcacaaccacccatgatgagatctgacgccctcttccggggtgtctgaagacaactacagtgtatttacatataataataaataaataatttaa

SEQ ID NO: 415 - DNA, 218 bp, Mus musculus
  misc_feature (1)...(218): n = A,T,C or G
ctgctacctgctgagagactgaacctgtcttcctgagaaattcctgagatancggacaacctgtggacttggcgacctantgctaacagctctgacagactagngctaacancttancaacaaagcatnaagaagcctggggnggcaggggatgggcctcccccctttataagagcagactcttagtaaactttgggccatgattggaaaaaaaaaaa

SEQ ID NO: 416 - DNA, 259 bp, Mus musculus
  misc_feature (1)...(259): n = A,T,C or G
gtcctttcctgcatgtacaccagaggatggcatcacacagctgtgagctgccatgcaggntctgggaattgaactcgggacctttggaagaacagcaagtactcttaaccactgagccatgtctccagcccataactgtttttatttgtaactattatagtatcaaaattgtatgtgatatannantgagnggaaanggnctggcgagatagttcagtgggtaagaacactgactgctcttncaaaggtcctgagttca

SEQ ID NO: 417 - DNA, 215 bp, Mus musculus
  misc_feature (1)...(215): n = A,T,C or G
aagctgctacctgctgagagactgaacctgtcttcctgagaaattcctgagatagcggacaacctgtggacttggcgacctaatgctaacagctctgacagactagtgctaacaacttagcaacaaagcatnaagaagcctggggtggcaggggatgggcctcccccctttataagagcagactcttagtaaactttgggccatgaaaaaaaaaa

SEQ ID NO: 418 - DNA, 669 bp, Mus musculus
  misc_feature (1)...(669): n = A,T,C or G
ttaaacccctttgggcccaattttttaaaaagggttncccaagggtaaaaaccctttgggnaaaggngtgggtaagtcnccnaacngnnctttgggtaancgaaccggccnagccccttnnaactccctcgtcggcanccagccganttnnaaccctagggacttgcncacncgtngggtngtgccatgttncgccgaggagaaccggctcnaaagncccngcatggtaaattcccaangatacgtaatctcgctaagannggacccccatgtaaatcggctccgtaagcatgngattaagagccgcnantnacgttggggagnaatgcangnattacntcgtattggccctcgtctctatactagnngtngtngncccncgtagagggactaangctcaacacgcggatacatgtgatgggnantatantataacannctcctagtgacttctctatntanaagagaantttagagtagaanagccnnaagcncagagtnnagangacttcacgcattntggatgatngcatgatcatggtacgactgccanggacagcagccatanagaggagcnatncagtnngcnatactcctccatggcctcagttcctgcctccagatttctgccttgagttcctaccctgacttccctggatgatgaactac

SEQ ID NO: 419 - DNA, 188 bp, Mus musculus
gtctcagaagtcagaagaggtcagtcagctcccctggtggagctggagctacaagcaactgtgaaaactactctgcatattactcttcaaaagcagtaacaagtgatcttccacccctctgcctctcctctgcaagaacagcaagtgctcttaacctgttaatcatggagcattttcactagcataaa

SEQ ID NO: 420 - DNA, 171 bp, Mus musculus
  misc_feature (1)...(171): n = A,T,C or G
gctggagagatggctaggcacgttaangagcactgactgctcttccagaggacctgggtttaattcccaccactacatgacagctcacaactgtttataactccaagatctgacaacctcacacagacatacatgtaggctaaaacaccaatgcacagaaaataaaaataa

SEQ ID NO: 421 - DNA, 248 bp, Mus musculus
  misc_feature (1)...(248): n = A,T,C or G
acctagagcggcgcctgcatgcggcagacctagggaatatttatggagaacgctcgtgaagataaaaatacttgttgnggctggagagatggctcagcggntaagagcactgactgcctttacagaggtcctaagttcaattcccagcaaccacacagtanctcacaaccatcagtaatggaatctgatgtcctcttctggtgcgtcgagaataaatgagataaataatcttttttaaaaaacaaaaa

SEQ ID NO: 422 - DNA, 262 bp, Mus musculus
aaaacaagcaggcatctacagaataagaagaaaagcatcagaacaggacaaaacaaactgaagaaaagaaagtcaaagcaagggctggagaaatggctctcagtggttaagatcgttcagtgactgctcttccagaggtcctgagttcaattcccagcaaccacatggtgcctcacaaccatctgtaatggaatctaatgctcccttctggagtgtctgaagcagccacagtgttctcatataaataataaataaataaaaa

SEQ ID NO: 423 - DNA, 202 bp, Mus musculus
gcttggtgcctgcagagacacggagacacgagaagacagaggagcatgtcggctcccctgagattggagtgtgaggtcgttgtgagtcaccatgtgcttgctccgaactgaacctaggtcctctgcaggagactcttaattcctgagtcatctctccagcttctggcattagtacttttttaatgtgagaaaattaaaaaaa

SEQ ID NO: 424 - DNA, 212 bp, Mus musculus
  misc_feature (1)...(212): n = A,T,C or G
ctgaaacctgcttactcaggggnggagcttgccgntcaatcgntctgccacagcacactgctggagcttgccgctttgctgtttcaaagccatcacgtgtncacctgcaaccttactcctagattatttggcggnaatcggcccctnccccttccttcataacggagtgctggaatagtaaaaantgaaccttgacagaaaataaataaata

SEQ ID NO: 425 - DNA, 378 bp, Mus musculus
  misc_feature (1)...(378): n = A,T,C or G
actgagatgcacctggtgactgacctttcatgatgagtccaccctgttggttttttgtagcattgcagcagtttgatcctgaacttgtgagcctgctgccttcaccttcaagtactgggactgtcagtggctgccgtcatacctggttctgagttccttctatgaaagccggactgtgctggcgcacgcctttcatcccancacttgggaaggcaaaggcaggcttgatatctgagtcaanggccagnccgggctacagagggaattctaggacagccaggctacacagagaacccctgtctcaaaaaaacaaccagccgggaanagcccttttttaagcccggccttnaaattggnacctggcattttataaattat

SEQ ID NO: 426 - DNA, 576 bp, Mus musculus
  misc_feature (1)...(576): n = A,T,C or G
gatgctgaatcttggngttttgcttcttaatttcctgacaacatattgctggacatcatcttcttcagtgagactgaaaatcttccggatgccgttatcttttggggaccccaaccttcaaggcacggtagtatctgtccgtctaggaatatcctcccttggctccttacaaataaccaagttgagaacactcagattaatgtccacaaagcatccatgaaccaactgggatgcctgaccccagttctccttggnctacaaccagaatttcccttactgaactgcacatgctctgtgccgtggggcaaaatcacttgttttcatgcgaaaactttgtcatttccacttctgatcaagaccacataaccttcaactcttcacacagggcttnggtggctactcctgtggcatgaacttctcatagagaggatgaaactttagttagtcacctacttcaatgagtttctgacagctggtggcttatccagctgatcacctangacagtggttctcaattttcctacnactgtggccctttaatacagtttctcctgntgtgatgaccccaaaccataa

SEQ ID NO: 427 - DNA, 248 bp, Mus musculus
ggtttctctgtgtagccctggctgtcctggaactcactctgtagaacaggctggcctcgaactcagaaatccacctgcctctacctcccgagtgctgggattaaagtgtgccaccatgcccggcttttgagtataagcattttataagagcattctctgtttatagcttttaaaagttcaacgtatttatcatgtataatgttattgcattgctataaaatatatgttttaatttataaataaaaaaa

SEQ ID NO: 428 - DNA, 204 bp, Mus musculus
  misc_feature (1)...(204): n = A,T,C or G
gacatggggcatcaggaagcaagaggcatcagaagaaataacatgagctgncatgngggtacacctntatgccagangagggcatcagatcccattacagacnggcngtganatgccatgtggttactggaaattgaccacannancctctggaagaacagacaattgctcttaaccactgagccatntctccagggcccatga

SEQ ID NO: 429 - DNA, 521 bp, Mus musculus
  misc_feature (1)...(521): n = A,T,C or G
ttcaattactatcactgtngagggaatgacntgnatttnntgtgaaaaatnantncnaanattgagctgncnatccnacaggaagcngtgcgacnagttgacctcatatcactaaggatcagggccngtccctgngtgcagtacctcatgggatcanaatnactcncantgctccctgaanacctncttccangcagntcatgagctatnancctnccagatttgacttccatccctctacttactgactattgaagtgaacagaaagctgagccaagcagcagactttgacctgttgagaagtgctcttacccaggacacactgcttcaagtaccattattcttcagccctgtggagcttccatttcagaagttctagatagagaacctgtccatggcctctgcatcagctcctgcccgcattggttcctgtcctgtttgaattcttggtctaactttcttcggtgatgaacagcaatgtggatgtgtaagctaaataaaccctttaatcctcaaaaaaa

SEQ ID NO: 430 - DNA, 393 bp, Mus musculus
  misc_feature (1)...(393): n = A,T,C or G
tcacgctcccctggtggagctggagctacaagcanctgtgaaanctactctgcatattactcttcaaaagcagtagcangtgatcttncacccctctgnctctactctgcaagaacagcaagtgctcttaacctggtaatcatggagcattttcactagcntgnangcncgcacacacgcataaangcatgaatctacatncntgcngntnacaaggactacatgagccaccacaccatgaaagaaagggaagncctggccaggcggtggcagcggcgcatgcttttaatcccagcacttgggaggcagaggcaaggtggatttctgagtttgaggccagcctggtctacaaagtgagttccaggacagccagggctatacagaaataccctg

SEQ ID NO: 431 - DNA, 205 bp, Mus musculus
cctcgaactcaggaacccgtctgcctctgcctctaccactgcctccagagtcctggcattaaaggtttgcgccaccactgaatgttgggttttgctgtctgttctcagctgtaaagccctaactaagacatgtagtgagatctaggtcccccagagctacacagtgagacctcatctacaacaaaacaatacaaaacaaaacaaa

SEQ ID NO: 432 - DNA, 255 bp, Mus musculus
aaggcacttactgcttgcttggcaagaaaatcaactgggagaatttaactgcagagaggccaatcaaattcctcaatgcagggtcaccaacagcatatctgttggaacctacttcttcaggagcccagcttatacagaagaccagctgagataactagcctcttggacttcctattcacagctgcccattgctgggttagttagactgcagcctgtaagtcatcacaataaattcccttaatatataaaaaaaaa

SEQ ID NO: 433 - DNA, 340 bp, Mus musculus
  misc_feature (1)...(340): n = A,T,C or G
cctggaactcaatctgcagaccanattggccttgaactcanagactgcttgcctcccaagaactaggatttaagatgtgcacctcagggctggagagatggctcagtgtttaagactgctcttccanaggccctgagtccaaatcccagcaaccacatggnggctcacaaccatcngtaatgagatctgangccctcttctggngtgnctgaagacagctacagtgtacttatatatnataaanaaatcttttttttttaaaanagctgnggacaaancccccatnccctnggctggctcgtcccacannaagggcagccatgtactctcttccttcggg

SEQ ID NO: 434 - DNA, 186 bp, Mus musculus
gtttttggccacttgacccaaggtagagttatttggggagaagctcaactgagaaagtgcctccatcagagtggccttgggcagtttctgcctccaggttcctgctttgagttcctgcccgacttcccctgaggatggacctgcgatccaaataaataaacaaattatccaccccaaaaaaaaaaa

SEQ ID NO: 435 - DNA, 354 bp, Mus musculus
  misc_feature (1)...(354): n = A,T,C or G
actgaggcaagcagcctgtncacgaggccctagntacttanngaggaacnatcccaggtcatgnnngnatncangnatnnanccatananccattnagtaaaccanccatccagccatccagccatccaccaacccagccatccagccatccagcaacccagccatccagccatccagcaacccagccatccagccatccagcaatagcaaaagcagcaaatgcagcagcagggaccaacagcagggggagcagtagcccccgccccaggctctctgggagctcttgaatttataccctctcaagagtccccagaattccaaatgcaaactatctgcagggggcaaaaatcatt

SEQ ID NO: 436 - DNA, 374 bp, Mus musculus
  misc_feature (1)...(374): n = A,T,C or G
gtggcatctgtcctcatcctgtgcttggagcctgncatatatgaatatggaaccgaagttctttgaagaagtgacatgttcactcaagctcaagactttgcacatgttaggttttgctacgctgcccaggatatccttgaactcacttgaacttggaaacctcctctctcacactcccgagtcgctgggactataggcctgtatctgaaggtcaggctttgntggttgttngtttgtagacagggtttctctgtgcagccctggctctgctggaactcactctgtagatcaggctggccttgaaccgatatccatctgcctctgcttcctgagtgccaagattaaaggcaatcacaaccacccaaaaaaaaaaa

SEQ ID NO: 437 - DNA, 202 bp, Mus musculus
gcttggtgcctgcagagacacggagacagagaagacacgaggagcatgtcggctcccctgagattggagtgtgaggtcgttgtgagtcaccatgtgcttgctccgaactgaacctaggtcctctgcaggagactcttaattcctgagtcatctctccagcttctggcattagtacttttttaatgtgagaaaattaaaaaaa

SEQ ID NO: 438 - DNA, 219 bp, Mus musculus
gagagaaatgcaccgaagaacttctcgtggtattccagctagttctggccagttctgctgacttgtgctcatttggtggagccttcgggatttctgctggatggggcctctgctactggttcatgtttggtgtttgctattgaactggactgctggtatcttgacaatgaagagtggaattgcccccaagaattaaacaggtccatgatccccttaaaa

SEQ ID NO: 439 - DNA, 141 bp, Mus musculus
  misc_feature (1)...(141): n = A,T,C or G
gctttcactatggagtcttggctagcctggaacacacagagatgtatctncccctgctgggattaaaggcctanctnacactanccagaattttacagaanaagaangaggaggangaggaggaggaggaggagaaggagg

SEQ ID NO: 440 - DNA, 130 bp, Mus musculus
  misc_feature (1)...(130): n = A,T,C or G
tttaatgtacacatgcaagaacaaaagcctgtgaagctggaacgcaactgaactnctggntantncagcaccaaatctgncngcatcatgccanacttnncaccatgatgataatgaactgaacctctga

SEQ ID NO: 441 - DNA, 789 bp, Mus musculus
  misc_feature (1)...(789): n = A,T,C or G
aactgttacaacctcaagtctttgaattcgaataagtgcagcttgcttacctgactcttccggcgggcctcgtacatgttctgctctaggcgggatggtgcagttgtgatgtgctaagcataaggcctcggccattctccagcaccatgaacgccatagtcgccctctgccacttctgcgagctccatggcccccgcacgctcttctgcacggaagttctacacgctcccctgccccagggggccggaagtggggacagtcctgaccaggttgagcaggctgaggaggaggagggtggcattcagatgagcagccgggtccgtgcccacagcccagcctgggtgccctacggcaagtgaccggcagccctgtgcacaaaggataaaaaatctcttaggcagaagcaggcagcacatctacagaaaacacaatccctttcaaatgttttttaaaaatcactgctgggcagtggtgatggcgcacacctttaatctcagcactaggaaggcagaggcagaggaatcttctaggagtttgaggccagcctgtctacagagtaaaggcccangacaagcgtaagctacacagaaaaccctggcttgaaaaaaccaaaaccaaccagaaagaaagaangaangaangaangaaagagagagagagagagagagagagaganagaaagaaagggaaggaagaaaagaancttgggntanccctntttgcaatgacttgttggaaaaaacnttctttttangnggnacaactttttttaagcgttaaaaaaaaaaa

SEQ ID NO: 442 - DNA, 402 bp, Mus musculus
  misc_feature (1)...(402): n = A,T,C or G
attccgagatgcatttccagactagaacccagacaatgagccgctggccggacacaacagatctggtgcccacgcgggactgagaaaaggcagaggacatttagaagaagcactgctggtttggagctccatagaagaagaaaataattagaggaaattcatactgagaagattgatcctaaacagctaccttattagggaagggaaaaacaggttctcgccacagaatgctgcagaagcatgatggttaattcgtgtgacgagctggcagcctagcaaggttggctgtgaccatcccctgcttaagcggagccatctgctgtgctgctcctttgatgtgccactacctgctgaggncnacctggctgaggccaaaccggtctcttccaagaattttccgga

SEQ ID NO: 443 - DNA, 488 bp, Mus musculus
  misc_feature (1)...(488): n = A,T,C or G
gagccacacccgtgcacctttctactggaccagagattattcngncggnaatcgggacccctcccccttccttcataanaagaactttannngtanacaccaaactntgntcataacancancancatnnacaannnttggataatcggtatggcttgaagcggtggcaaataggggaaatcgcttccaagatcgggcagctgtattaccactattatttacgaacttctgagaccagttatctgaatgaggctttctccttctactctgcaatcagacagagatcatactactctcaagtcaataaagaggacaggcctgagttggttgttaagaaactccgatactacgcaagatttatagtagtttgcttcttcttaacaaaatggacgttgtgaaagacctggtaaaggaattgtctgtgaaattgaagattatactcatcgctttaatactgaagatcaagtcnagtggaaccctggtgcttt

SEQ ID NO: 444 - DNA, 368 bp, Mus musculus
  misc_feature (1)...(368): n = A,T,C or G
gagatcatggaaagcacccaggtgattgactgggatgctgaagaagaggaagagacagaactatccagtggctccttggggtatagtgtggagcctatagggcagctacgtctcttcagtggaactcatggaccagaaagagatttccccctctaccttggcaagaatgtagttggtcgaagccctgactgctctgtggccctgccttttccatccatctccaaacagcatgcagtaattgaaatcccagcaaccacatggnggctcacaaccatccgtaacgagatctgncgccctcttctggagtgtctgaagacagctacagtgtacttacatataataaataaatanntttttaaaaaaaaaaa

SEQ ID NO: 445 - DNA, 264 bp, Mus musculus
agactgagattgctgccaggctatgggtgtcccaggtactgacaggaccacaccattgctgtctttaagaaacttgctgggggctggcgagatggctcagtggttaagagcatcaactgcttttccgaaggtcccgagttcaaatcccagcaaccacatggtggctcacaaccacccgtaaagaaatctgatgccttcttctggaagatctgaggacagctacagtgtacttacatataataaataaatctttaaaaaaaaaaa

SEQ ID NO: 446 - DNA, 207 bp, Mus musculus
  misc_feature (1)...(207): n = A,T,C or G
cactgaggcttgctgcctgcanagacaggagacngagaanacagaggagcatgtcggctcccctgagattggagtgtgaggtcgttgtgagtcaccatgtgcttgctccgaactgaacctaggtcctctgcaggagactcttaattcctgagtcatctctccagcttctggcattagtacttttttaatgtgagaaaattaaaaaaa

SEQ ID NO: 447 - DNA, 396 bp, Mus musculus
  misc_feature (1)...(396): n = A,T,C or G
gatgaaaactgagacacaccagaagaggttgggagccaccaggtggttgctgagaattgaactcaggccctctggaagagcagtcagtgttcttaactgctgagccatctctccagcccccaacatatttttttcttcattgtggggagccgtgagcaattgccatcatgagcctccgctgtgcctaactggtaaacaagtaatgtgcgcaggtgcaagagtaaattcgtgccaagtcactgcccatcccggggcatagtannggggngatgagtgagcagctaatcaggagctgacacgtcacatggaggggtatataagcagcatcattttccttgttcggggttgttcttctttcgcctatgcaatcaatgctctcccaataaaccgtgggcc

SEQ ID NO: 448 - DNA, 402 bp, Mus musculus
  misc_feature (1)...(402): n = A,T,C or G
aactgagaaagaagagaanccgggcggtggtggcgcacacctttaatcccagcacctgggaggaagaggcaggcagatttctganttcgaggccagcctggtctgcaaggtgtatgagncttttgcctgcatgatgtctgngcaccatgtgaatgcaatgcctatggagtccanaaagggtgtcaagatctcctggaactgaaagtacagttgtgagctgcatgtggggtgcctgaaaattgaacccaggtcctctggaagagcagtcagcacccccaaatcnctgaggcatcttttcagctcttccttatctgctttttacananttnggggggggtttngaaccnaagggctccttgnatgnttaaccaagnccnttttccaaaaaaatttcaaccccca

SEQ ID NO: 449 - DNA, 263 bp, Mus musculus
  misc_feature (1)...(263): n = A,T,C or G
tctttgagagcctctaccagcagctgactgagacagaagcagatacttacagccaaccaactctgaggaanagttgggggaaggactgaaggagctgaagggggnggcaaccccataggaagaacaacagggncaactaacctggatcctaaaaactcccanagcttaaccccnaatcaagagtttacaagggctggccatgggccctgtggncatactcacataaggcttcctgnctggcttcaangggaaaagatgttttt

SEQ ID NO: 450 - DNA, 233 bp, Mus musculus
  misc_feature (1)...(233): n = A,T,C or G
cggtgctctcctggtccntgccngtttgatgaacttggcaagagacagcacaagagagactcctgctgctgctgctgctgcctccgcccctgctactgctgctgttgctgctgntgctgctgtgagagatgccacctgaagccaggagggaaggaagngggaggagaccggcctaagcaggcttaatttcattatgaattcctgcctattctgagcagattgtccccaaattt

SEQ ID NO: 451 - DNA, 329 bp, Mus musculus
  misc_feature (1)...(329): n = A,T,C or G
atgctctcaataatcaaccacttgtgtcttgtggggagccaccctcacattcgccgttacaagatggcgctgacatcctgtgttctaagtggtaaacaaataatctgcgcatgtgccaagggtagttctccactccatgtgntctgccttccccgagagancnactnnnncgangggctgcattccaatcanggagtgacacgccctttgcgatatnataattttccttaaaaaggnatggggtttcaccattctctnttttgggctttttncttgctctcttngcttctnttgngctctggctcctaaaaagattgtaagcactcaaa

SEQ ID NO: 452 - DNA, 381 bp, Mus musculus
  misc_feature (1)...(381): n = A,T,C or G
agcactgaggaaagtgcaacagagggaagggactgtctgacaaaccagcacacctgaagggctctccctgtgcgcctgcccgaggaggacgaagggagagangaagaagganaagaagaagaanaagaaggagangaagaanaaganggagaagangaagaagaanaagaagaagatnaaganntggantnnntnttcctttttttttttgnnntngnagcttnctctgnnctgcacagtgggttccaggccagtctggactgcacagtgggttccaggccagtctggactgcacagtgggttccaggccagtctggactgcacagtgggttccaggccagtctggactgcacagtgggttccaggccagcttgggctgca

SEQ ID NO: 453 - DNA, 199 bp, Mus musculus
  misc_feature (1)...(199): n = A,T,C or G
agactgagtcgaggtgtgaaaaaattctaaattcagttgaagttcctgatgaagagacacaattgagatttttttttccagtgataaaaactgcntatttggggctggaganatggctcagctnttaanagcgccaactgctcttcaaaaggtcctgagttcaaatcccagcaaccacatggnggctcacatccatccg

SEQ ID NO: 454 - DNA, 309 bp, Mus musculus
  misc_feature (1)...(309): n = A,T,C or G
ctctctttctcgtattttccancttnaatncctcagttttcnnncctgccctcnctgngcctgcnntgcctgaaaagaccagaagagggcatnagatgccgtngattgnaantacagacggttatgaggagccatgtgggntgctgngaatcnaacctangtcctctgaaagagcaactgntgntcttaaccaccaagccatctcttcagcctncaggaatgntatttntgaggaaagccaggcntgattctaaangnnnaccttttaaattataactacttattattttcctgggatgggctaaaaaa

SEQ ID NO: 455 - DNA, 263 bp, Mus musculus
  misc_feature (1)...(263): n = A,T,C or G
ctccagtgccttgcttgcctgcctgctgccttgctccctgccntgataatcatggactaaccctctaaaaccatattttggccttctgatcactagcccacatcaagaaaaaaatattttgctgggcggtggtggcacacgccaatcccagcactcaggaggcagaggcaggcggatttctgagttcgaggccagcctgttctacaaagtgagtgccaggacagcctgggctacacagagaaaccctgtctcaaaaaaaaaaa

SEQ ID NO: 456 - DNA, 181 bp, Mus musculus
actgaggattctggcatatactgaagaccagctgagacccagcctcgtagactgaacaaccactgcattcttgcgtcttctcttcataggcagccattgcttgatgagctggaccacaacctaagaagaagaagaagaagaagaagaagaagaagaagaagaagaagaagaagaagaagaa

SEQ ID NO: 457 - DNA, 225 bp, Mus musculus
gactgagctgctacctgctgagagactgaacctgtcttcctgagaaattcctgagatagcggacaacctgtggacttggcgacctaatgctaacagctctgacagactagtgctaacaacttagcaacaaagcatcaagaagcctggggtggcaggggatgggcctcccccctttataagagcagactcttagtaaactttgggccatgattggaaaaaaaaaaa

SEQ ID NO: 458 - DNA, 257 bp, Mus musculus
  misc_feature (1)...(257): n = A,T,C or G
actgagcagtccctcctctggccccaacacggngtctccatctcttgctttgctggcaagcaacctgtccatgcctccaagtgacctcccacctggtggcacatgcatttaatcccagcactagggagggaggtggatctctgtgagttcaaggccagcctggtctacaaagtgagttccaggacagccagggttgttacacagagaatgctacaatgcttaaaatattgtgtcttaaaaaaccataaaagaaaaaa

SEQ ID NO: 459 - DNA, 385 bp, Mus musculus
aatggatactagccataaagtacaggatacacacagaagctaaacaagaaggaagacccaagcaaagatgcttgaatctctcttagaaaggttcactccatcagcagctgactaaaacagatgcagagacccacagccaaacattggatggagtttggggactcttatggaagagatgaaagaactgagggccctgaagtggataggaactccagaggaagaccatcatggaccctaacatggacctttgggtctctcagagactgaaccaaccaaagaacatacatgtgctggacctagaacctctgcacatatgtagcaaatgtgcagctctatcttcatgtgagtcccccaacaactggagcaggggctatctctaaaactg

SEQ ID NO: 460 - DNA, 315 bp, Mus musculus
  misc_feature (1)...(315): n = A,T,C or G
gaatcggcagacagaagnggaagaagcctttggagagagccagangccgacagaggacggaagagncgaagnggctattcctggttgncanctngncnntatttggaatgaactacaatccggaattggaaggctcaccagtgacccttatctggaggctngganatccttatctggatcttggntngaagancttgagccatattggctatggattccagaagantgaatctccgagnttaaggaacacacctttaatctgggctacgcctttcatctgggattaaaggtgtggtggaacacagaccttacaca

SEQ ID NO: 461 - DNA, 196 bp, Mus musculus
  misc_feature (1)...(196): n = A,T,C or G
agatgtgtgtcacccacccnccaccccccaatncntgagctctcccccagggactggaccaccaaccaaagaatacacatggagggaacaggctgcaaatgtgacagaggatgaccttgtttgaacatctgatctaaagggaatgggagaagcaaagaaaaacatcctgtgatccctataatggcaaaaaaaaaaa

SEQ ID NO: 462 - DNA, 208 bp, Mus musculus
gactgaggcttggtgcctgcagagacaggagacagagaagacacgaggagcatgtcggctcccctgagattggagtgtgaggtcgttgtgagtcaccatgtgcttgctccgaactgaacctaggtcctctgcaggagactcttaattcctgagtcatctctccagcttctggcattagtacttttttaatgtgagaaaattaaaaaaa

SEQ ID NO: 463 - DNA, 209 bp, Mus musculus
gactgaggcttggtgcctgcagagacaggagacacgagaagacacgaggagcatgtcggctcccctgagattggagtgtgaggtcgttgtgagtcaccatgtgcttgctccgaactgaacctaggtcctctgcaggagactcttaattcctgagtcatctctccagcttctggcattagtacttttttaatgtgagaaaattaaaaaaa

SEQ ID NO: 464 - DNA, 409 bp, Mus musculus
  misc_feature (1)...(409): n = A,T,C or G
gaccctgagaatcttgagcaggaaggacctgaatgacctaatgattaactttcgtggtatcagaaggtaccatgcaagcttccaaagaagggaaacaaccagcatcctatgtagctgtgacagctacgaactggaagtaatttgaaagatgattccaagagtttcagcattgaccttcggagctctaaggctggccaaaaacttgagcttggtgatcctctgcttagtctgttggggagggtgggacactaggcatgcgctactgtgctcagttttgaaagcaactttaaataaaacattttaatttnnaggacagggacaccaacaaacnaatggggccgccnnngganttnattgataaggaccaggacattaatgacnaccctgnanagtttttgcctgaaattat

SEQ ID NO: 465 - DNA, 397 bp, Mus musculus
  misc_feature (1)...(397): n = A,T,C or G
agccccaagagggtctgtggtggctgctgctctccctgttgttcctgttgccactttggattgctggattgctggattgctggattgctggattgctggattgctggattgctggattgctggattgctggatngctgggttgctgggttgctggattgctggattgctggattgctggttggagatatcctgaagacagagattggactttccccaaggaacccaacatccctaatcagcaggaaatagtctaaagaggtctacgacccttttctcctctaaccgtctttctctcctacctagtgctgaagggttggaaggatttggggccggaataaggggttaaaagagtggtaagatgtaagaactnnataaagntggccccaaaaaaaaaaa

SEQ ID NO: 466 - DNA, 119 bp, Mus musculus
  misc_feature (1)...(119): n = A,T,C or G
agccaccgggtccacggnggttcaagacctaaactcaactggagaccangctgtctatgcataacccattgcccccacgtgtgtgtgtgtgtgtgtgngtgtgtgtgtgtgcgtgtgtg

SEQ ID NO: 467 - DNA, 117 bp, Mus musculus
  misc_feature (1)...(117): n = A,T,C or G
cctgacctcgggtccnacgggggttcaagacctaaactcaactggagaccaggctgtctatgcntaacccattgcccccacgtgtgtgtgtgtgtgtgtgtgtgtgtgtgtgagggc

SEQ ID NO: 468 - DNA, 192 bp, Mus musculus
  misc_feature (1)...(192): n = A,T,C or G
agtacgaaggaaatgtgnccacaaggcggcagtagaactcaaaaacttgaagagntttnaaangactgatcctggagagacggctcactggttaatannagtgactgctattccnanggnnctgagttcntttcccagcaaccacatggngactcacaaccatcngtattgggatctgataccctcttctgg

SEQ ID NO: 469 - DNA, 406 bp, Mus musculus
  misc_feature (1)...(406): n = A,T,C or G
ctgagagcacactgcccgtgagaagtgtccatgatgcaaagcttgggaagactgagaagaagacacataagtaggattccccatacatcttatggttgacctccatatgaaccacatatgcagtcacaaatgatgttccctccttaatcctnctgctngatacgaagctttcagtcctgtggcacactcaagtcctgaagtaccggctgtnaagcccttggcttggactcttgaaacaccagttaccagtgtcactgtaacagggccccagaccttagcacaatagactccatgatggaagtaccattcaggctgtaaaacagcaccacctgccaaaactaaaacaagaggcctaatccatcaaaccccatagtcccgggaaaggctctaaacatattaaccctac

SEQ ID NO: 470 - DNA, 252 bp, Mus musculus
ctgagattgctgccaggctatgggtgtcccaggtactgacaggaccacaccattgctgtctttaagaaacttgctgggggctggcgagatggctcagtggttaagagcatcaactgcttttccgaaggtcccgagttcaaatcccagcaaccacatggtggctcacaaccacccgtaaagaaatctgatgccttcttctggaagatctgaggacagctacagtgtacttacatataataaataaatctttat

SEQ ID NO: 471 - DNA, 284 bp, Mus musculus
  misc_feature (1)...(284): n = A,T,C or G
actgggtcccgtggagtcctggaacccagatggcgaccgctgctgctgaggctgaggccgcctcccaagccaggcggacacctgtcctctggtccggatggtggccggctgtctgcggcccgccaagggtgctgcctcagcggctctgtgcttccgcccgtcccanaagctgtccggttctctggcgcaccctctaacctgttcagactaatttccctggaaaggtctttcttgaataccttgtaaaaataaagaagctttaataaacagattttactattaaa

SEQ ID NO: 472 - DNA, 334 bp, Mus musculus
  misc_feature (1)...(334): n = A,T,C or G
actgggatgcctgactnatgatgctgtgcttgtgnactttnctggngangagnagaanttgctgggtccttcctatgaagagngctttacacacgatgtgcngctgnagacctacttangacctcactgttattggccacacttgggagagactatcatattgggaggacnttgccttnttccccatgacttgagaggcanncttcatgtgcnanctgatacncatacngcctctgaggaaattttantntntncngcaagcnctgatgaaaaagcaaaattgccnggcagtggtggaggacacctttnatcccagcacttgggaggaagaaac

SEQ ID NO: 473 - DNA, 179 bp, Mus musculus
  misc_feature (1)...(179): n = A,T,C or G
acctgcctgaaggagagattctctgtcctgttgagctctncacaagtagtgtaatgaactccagggttcctgctcttggtgatgtagctatatttgagttgaccctgcccctgcccttgcccttttacttatattcttgcgaataactctaataaactcattggattaccagattggaa

SEQ ID NO: 474 - DNA, 392 bp, Mus musculus
  misc_feature (1)...(392): n = A,T,C or G
tgagtctttgtcttcctgngngggtgagggctgaggtatancctgtgcagaggccataatatcntnttgtggaactntcccggtatncacaggacacatggctggatccatatagaaagaaagaagagagggtgnnanaanncttattgnaangnggaacaaanatacccatgggagganatacaaagtgtggagcanagactgaaggaaaggccatccagagactgcccnacctggggatccatcccatatacagttaccaaacccagacactattgtggatgccaacangtggttncttgacaggagcctgatattagctgtcntcctagagaggctctgccagtgnctgacaactacagaggtgngatgctcttcatccaaaccatttg

SEQ ID NO: 475 - DNA, 189 bp, Mus musculus
  misc_feature (1)...(189): n = A,T,C or G
gatcacagagacctaggaacnggaagaganggntcaccgggtaatgaacactngacngctcttccaaangagnctgagttcaactcccancaaccacatggtggctcacaaccatctgtaangagatcngacgccctcttctggtgtgtgnnanacacangtacnangcngttgcatacataatgaata

SEQ ID NO: 476 - DNA, 258 bp, Mus musculus
  misc_feature (1)...(258): n = A,T,C or G
tgactggctcaccagcggactcaaccctgaaacagggangagatgtgggntnccctcccccagnctgaaacctgnttgctcggggaggagcttnctgctcattcgttctnccacgcccactgntggaacctgaggagccacacacgtgcacctttctactggaccagagattattcggcgggaatcgggtcccctcccccttccttcataactggngtngcaacaataaaatttgagccttgatcaggaaaaaaaaaa

SEQ ID NO: 477 - DNA, 212 bp, Mus musculus
tttgtggagggatcttttgagaaatatctggaacggttgggagatcccaaggagagtgctggccagaaattcagctgagagcaacagctctcaaagctgtttgtgtctccagctactctctgaaccagctcccgacaggaggcaggagactagcctcagatttacaatttgcatttgaataaagtacctagacttccccgaaagaaaaaaaa

SEQ ID NO: 478 - DNA, 214 bp, Mus musculus
agtatgtggagggatcttttgagaaatatctggaacggttgggagatcccaaggagagtgctggccagaaattcagctgagagcaacagctctcaaagctgtttgtgtctccagctactctctgaaccagctcccgacaggaggcaggagactagcctcagatttacaatttgcatttgaataaagtacctagacttccccgaaagaaaaaaaa

SEQ ID NO: 479 - DNA, 283 bp, Mus musculus
  misc_feature (1)...(283): n = A,T,C or G
tgaagcaggctgatccatactttgaccttgctgccactganaaggcaatnacctaaggtggagccttccgacctagatggctcttttgttctatcacctgccantgctctctncaagacactgctacccgctgngaagcccctgagacattctggaggaacatnctattctgcacatcgcctacaggctgactccaaacaccaagaatggactggcgggggatggaccttcccctttataagtagactcccgtagtaaactggagggccttgaaaaaaaaaaa

SEQ ID NO: 480 - DNA, 275 bp, Mus musculus
  misc_feature (1)...(275): n = A,T,C or G
agactgagactagcctagcataactgtcttctgagaggcttnatccagcaactgatggaaacagatacagagacacacncccaaacattaagtggagcttgggagaattccttggaagagagggatgatggactgaaggagccaganaggtcaaggacaccagaagaaaacctacatgaattaactaacctgggttgtgggactcacagaaattaattaccaaagancatgcnncaggaacgcagatgtcgtgagatgccaggacttggaaggtg

SEQ ID NO: 481 - DNA, 564 bp, Mus musculus
  misc_feature (1)...(564): n = A,T,C or G
ccctgaacaattgattcagacttgacctcgctgccgctgagcatganaccacctggggtggagccttccgacctatccggctctattgttctgtcacctgctgctgctcgtctccaanacactgctacctgctgaaaggcccttgagataatctggagacagcatccagccgatcacctactggctggcgaagggcaccaagaatggattgtttggggggggcagggggaggaatggttcnctctctttttttttatttttntcaattttcnttttttttntttttttttttttaatnttatatttttnttcttntaacttttttcttntnntntttatatnntttatttntatctacttnatnttttattnnctttnntataattntatatgngatatntttatantttctttatattttatcttnntccatnntntnnnttntttantnatatnctntntatgntnttttanntttgtcttnagctnnatgttctattnttttatgnttanntttatttntntctttcatactattttattntctntttctttatataatta

SEQ ID NO: 482 - DNA, 359 bp, Mus musculus
  misc_feature (1)...(359): n = A,T,C or G
aagaaacattttcccaacaatgtggagagccttgctgcgagcaattgcatgtgtgccgccagnaattgctgtggagagccgtgccgcgagcaatcgccattataanangnngntggcctccgctgngcctaactagtaaacaagccttgtacgcaggtgcgagagtgaactcactcctagncactcccattctcggggtgtaataaggggggtgatgggcnancatctantcaggagctgtcacgccatatcaggtgctgaaacctcacgctgcgggttataaaagcagcgccattttcccggtttggggtcttcctgaagaagtaagcaataaagcttttgccacggaaaaaaaaaaa

SEQ ID NO: 483 - DNA, 159 bp, Mus musculus
  misc_feature (1)...(159): n = A,T,C or G
tggacagagaactctcangttcctgttctggccaccctgagaaagtgtgctgagaaccagaagaaaacaagagctgggtgtaacagcacttgggacgcagtgagttccaggctagcctgatctacatagagaaagcctaccaagagaagaaagaaaaaa

SEQ ID NO: 484 - DNA, 137 bp, Mus musculus
  misc_feature (1)...(137): n = A,T,C or G
cactgaggaatctttgcctacatgaattacagagttcccaagacaaggaaagagattttcgaaaccctttggacttccattcacagctgtgactgaacgatngttgggaattgagctgccgactgtaagtcatcaat

SEQ ID NO: 485 - DNA, 273 bp, Mus musculus
  misc_feature (1)...(273): n = A,T,C or G
cactgatgacattggctggccagcgagtccctggagtctgctgtcttcaccggctgtcaccactgggttacagctgtgtgcaactgtgctcagcttttacatagatgctnagggctctacactgaggttctcaggcttgcatgaaagcactcatcacccactgagccatctccccagtcacagatcagntattcgttnataaaaacttatgtagttttatatgtanaggaaatttattttcccagcatacacatgacttgttaataaatattg

SEQ ID NO: 486 - DNA, 199 bp, Mus musculus
  misc_feature (1)...(199): n = A,T,C or G
gcctgctgttgaatttctaaggagtttgccttggaagaatcagacagcaggatggacttgggaggacacctantggcagagcantnncttncntggaactntcaatgtanaccaggctggcctgganctaanagagataacctgcctctgactcctggatactggnattaaagggattcaacaccattcaaaaaacata

SEQ ID NO: 487 - DNA, 200 bp, Mus musculus
  misc_feature (1)...(200): n = A,T,C or G
actgaggtctcataagtcagaagaggncacgtcagctcccctggtggagctggagctacaagcaactgtgaaaactactctgcatattactcttcaaaagcagtaacaagtgatcttccacccctctgcctctcctctgcaagaacagcaagtgctcttaacctgttaatcatggagcattttcactagcaaaaaaaaaa

SEQ ID NO: 488 - DNA, 127 bp, Mus musculus
  misc_feature (1)...(127): n = A,T,C or G
tggtggagctggagctacaancaacttgtnangaactactctgcatattactcttcanaagcagtaacaagtgatcttccacccctctgcctctcctctgcaagaacagcaagtgctcttaacctgt

SEQ ID NO: 489 - DNA, 136 bp, Mus musculus
  misc_feature (1)...(136): n = A,T,C or G
tgggagaactactctgcatattactcttcanaagcannaacaagngatcttgcacccctctgcctntcctctgcaagaacagcaagtgctcttaacctgttaatcatggagcattttcactagcaaagaaaaaaaa

SEQ ID NO: 490 - DNA, 201 bp, Mus musculus
agactgaggtctcagaagtcagaagaggtcagtcagctcccctggtggagctggagctacaagcaactgtgaaaactactctgcatattactcttcaaaagcagtaacaagtgatcttccacccctctgcctctcctctgcaagaacagcaagtgctcttaacctgttaatcatggagcattttcactagcaaaaaaaaaa

SEQ ID NO: 491 - DNA, 156 bp, Mus musculus
  misc_feature (1)...(156): n = A,T,C or G
tcttcccctagtggccttcanatgaagncntagagctctcacnctcctcctacaccatgttgccggaacactgacatgctctgccttgatgataacagactgaaactgtgaacctgtaagccanccccaaataaatattgttcgcataaaaaaaaa

SEQ ID NO: 492 - DNA, 160 bp, Mus musculus
ggtggagctggagctacaagcaactgtgaaaactactctgcatattactcttcaaaagcagtaacaagagatcttccacccctctgcctctcctctgcaagaacagcaagtgctcttaacctgttaatcatggagcattttcactagcaaagaaaaaaaa

SEQ ID NO: 493 - DNA, 197 bp, Mus musculus
gactgaggtctcagaagtcagaagaggtcagtcagctcccctggtggagctggagctacaagcaactgtgaaaactactctgcatattactcttcaaaagcagtaacaagtgatcttccacccctctgcctctcctctgcaagaacagcaagtgctcttaacctgttaatcatggagcattttcactaaaaaaaaaa

SEQ ID NO: 494 - DNA, 179 bp, Mus musculus
agactgaggtctcagaagtcagaagaggtcagtcagctcccctggtggagctggagctacaagcaactgtgaaaactactctgcatattactcttcaaaagcagtaacaagtgatcttccacccctctgcctctcctctgcaagaacagcaagtgctcttaacctgttaaaaaaaaaaa

SEQ ID NO: 495 - DNA, 191 bp, Mus musculus
gactgaggtctcagaagtcagaagaggtcagtcagctcccctggtggagctggagctacaagcaactgtgaaaactactctgcatattactcttcaaaagcagtaacaagtgatcttccacccctctgcctctcctctgcaagaacagcaagtgctcttaacctgttaatcatggagcattttcactagca

SEQ ID NO: 496 - DNA, 218 bp, Mus musculus
  misc_feature (1)...(218): n = A,T,C or G
catagaggagcacaagactggatnaaggataaaggaccgggaaaagtctaagcatagcaacagtgaacataaagattctgaaaagaaacacaaagagaaagagaaaaccaaacacaaagatggcagctcagaaaaacataaagacaaacataaagacagagacaaggaaagacgaaaggaggaaaagattagagctgctggggatgcaaaaaaaaaaa

SEQ ID NO: 497 - DNA, 187 bp, Mus musculus
aagactgagcaactccggcctgtggcacacgcctttaatcccggcactctggaggcagaggcggctggatctctgtgagtttgaggccatcctgatctacaaagccaattctaggacagcctggactacataaccctgcctctaaaagccaaaaataaaggaaagtggagcaacctaaaaaaaaaaa

SEQ ID NO: 498 - DNA, 209 bp, Mus musculus
gactgaggagagagccagtgaaggccacagtgtccatgtggaggtcacagatgacagacaacttctggaaatcggttttctccttccactatgtttaccttgaaattcaaactcaagttgtccgctttggcagctggcacttctaccacagagccaccgtctcagttcctccaagtcccctaacactgagaagaagaagaaaaacaaaa

SEQ ID NO: 499 - DNA, 346 bp, Mus musculus
  misc_feature (1)...(346): n = A,T,C or G
cgtaagccaagtatgaccttgaactcctgttnctntgcttncatgccccgaggactgggattgcattgggtaccaccctgccctgtggtgctggncattgaatctaaggcttcatgggtactaggcattccctccacgactgaactgtatccccagcctacagncaaaatgtnanagtangggctggagatggctcaagtggttaagagcactgactgctcttccagagtcctgagntcaaattccagcaaccacatggtggctcacaaccatctgtaatgggatcggataccctcttctggtgtgcctgaaaacagctacagtgtactcaagtatataaaatata

SEQ ID NO: 500 - DNA, 197 bp, Mus musculus; identical to SEQ ID NO: 493

SEQ ID NO: 501 - DNA, 198 bp, Mus musculus
ctgaggtctcagaagtcagaagaggtcagtcagctcccttggtggagctggagctacaagcaactgtgaaaactactctgcatattactcttcaaaagcagtaacaagtgatcttccacccctctgcctctcctctgcaagaacagcaagtgctcttaacctgttaatcatggagcattttcactagcaaaaaaaaaa

SEQ ID NO: 502 - DNA, 200 bp, Mus musculus
gactgaggtctcagaagtcagaagaggtcagtcagctcccctggtggagctggagctacaagcaactgtgaaaactactctgcatattactcttcaaaagcagtaacaagtgatcttccacccctctgcctctcctctgcaagaacagcaagtgctcttaacctgttaatcatggagcattttcactagcaaaaaaaaaa

SEQ ID NO: 503 - DNA, 169 bp, Mus musculus
  misc_feature (1)...(169): n = A,T,C or G
cagtcggctcccctggtggagctggagctacaagcaactgtgaaaactactctgcatattactctccaaaagcagtaacaagtgatcttccacccctctgcctctcctctgcaagaacagcangtgctcttaatctgttaatcatggagcattttcactaaaaaaaaaa

SEQ ID NO: 504 - DNA, 219 bp, Mus musculus
actgaggaggaggcagatggttttgcaggtaaaggcgcctggtgccaagcgtggctgcctgagttcagtccccggaactcggaaggtggaaggtaagatcctagtcctccaaattgttctctaacctctacaccgctctgaggctccagggtacttacacacatacacggaaacaatcaaccagtcaaacaataaacgtaaaatattacaaaaaaaaaa

SEQ ID NO: 505 - DNA, 178 bp, Mus musculus
  misc_feature (1)...(178): n = A,T,C or G
aaccttcggagagcaatcnggngctcnttacccactgagccntctcaccagcccgtatgcatgcattattatgcatgaaactacactgcggctgtcttcagacacacaccanaagaatacatgggatcccacggcagatggttgttggaaattgaactcaggacctctggaagagagg

SEQ ID NO: 506 - DNA, 262 bp, Mus musculus
  misc_feature (1)...(262): n = A,T,C or G
tagattgattctgcctnccaacnagaacatnctgaggaagngatgagccacgnngctcggngacnnttaaagntttagatgtgcngatcccttcatgtatactttacagaaaaccatgctaagccgggcgtggtggcncacgcctttagtcccatcactctggaggcanaggcaggcggatttctacaaagtgaggccagcctggtctacaaagtgagttccaggacagccccagggctatacagagaaaccctgtctcaaa

SEQ ID NO: 507 - DNA, 175 bp, Mus musculus
  misc_feature (1)...(175): n = A,T,C or G
agaagaggtcagtcagctcccctggtggagctggagctacaagcaactgtgaaaactactctgcatattactcttcaaaagcagtaacaagtgatcttccacccctctgcctctcctctgcaagaacagcaagngctcttaacctgttaatcatggagcattttcactagcattt

SEQ ID NO: 508 - DNA, 195 bp, Mus musculus
  misc_feature (1)...(195): n = A,T,C or G
gaagccctgtgtgtttcaatnntaagaggtcagncagctcccctggtggagctggagctacaagcaactgtgaaaactactctgcatattactcttcaaaagcagtaacaagtgatcttccacccctctgcctctcctctgcaagaacagcaagtgctcttaacctgttaatcatggagcattttcactagcaga

SEQ ID NO: 509 - DNA, 154 bp, Mus musculus
ggagctggagctcaagcaactgtgaaaactactctgcatattactcttcaaaagcagtaacaagtgatcttccacccctctgcctcccctctgcaagaacagcaagtgctcttaacctgttaatcatggagcattttcactagcaaaaaaaaaa

SEQ ID NO: 510 - DNA, 196 bp, Mus musculus
  misc_feature (1)...(196): n = A,T,C or G
gactgagagcatactgcccncttaggtctnagaagtcagaagaggtcagtcagctcccctggtggagctggagctacaagcaactgtgaaaactactctgcatattactcttnaaaagcagtaacaagtgatcttccacccctctgcctctcctctgcaagaacagcaagtgctcttaacctgttaaaaaaaaaaa

SEQ ID NO: 511 - DNA, 198 bp, Mus musculus
  misc_feature (1)...(198): n = A,T,C or G
tgggtctcagaagtcanaagaggtcagtcagctcccctggtggagctggagctacaagcaactgtgaaaactactctgcatattactcttcaaaagcagtaacaagtgatcttccacccctctgcctctcctctgcaagaacagcaagtgctcttaacctgttaatcatggagcattttcactagcagaaaaaaaaaa

SEQ ID NO: 512 - DNA, 175 bp, Mus musculus
  misc_feature (1)...(175): n = A,T,C or G
cttctccactgggtcaccttgccagcctactgtgtgcttcctgagtacaaggnctcattatgtagccgtggctgtcctgtaacttgctctgtagaccaggctggcttccaactcttagagatcctcctgcctttgcttctgcgattaaaggcctgggccaccaccaaaaaaaaaa

SEQ ID NO: 513 - DNA, 170 bp, Mus musculus
cagacaggagacagacaacacagcaggagcatgtcggctcccctgagattggagtgtgaggtcgttgtgagtcaccatgtgcttgctccgaactgaacctaggtcctctgcaggagactcttaattcctgagtcatctctccagcttctggcattagtacttttttaatg

SEQ ID NO: 514 - DNA, 307 bp, Mus musculus
gactgagctatattgtcccaattgagaggatctgaggctggttatccaaagctgcctggaaatgcagtctgggtgtgtgtggcagtctgaatatgctcggcccagggagcgaagtgtgtcactgtggctgtggacaatgagaccctcatcctaactatgtgggagctagtcttcttctagtggccttcagatgaagatggagaacgcctgcctggatgctgccatgttcccgccttgatgataatgcactgaacctctgaacctgtcgccagccccaattaaacgttgtcctttataaagaaaaaaa

SEQ ID NO: 515 - DNA, 246 bp, Mus musculus
  misc_feature (1)...(246): n = A,T,C or G
gactgacaaaaagattctccggcctacagcatgattttggcttgatgtgaaaagattaagtaaataagattgtgtggtcttgggctggtgagatggctcantgggtaanagcactcgactgctcttctgaaggtctggagttcaaatcccagcaaccacatggnggctcacaaccatccataacaagntctgactccctcttctggngtgtctgaagacagctacagngtacttacatataataat

SEQ ID NO: 516 - DNA, 236 bp, Mus musculus
  misc_feature (1)...(236): n = A,T,C or G
gaggtgcgacctggttggaatgggtgngtcactgtgggtgttggtataagatcctcacccttgttgcctggaactcagtcttccactcacagcctttggatgaagacagaactctcagctccttctgcaccatgcctgcctggaaactgccatgctcccaccttgatgataatggactgaacctctgaacctgtaagccagccccaattanatgttgttttttataagaaaaaaaa

SEQ ID NO: 517 - DNA, 225 bp, Mus musculus
acactgactgctacctgctgagagactgaacctgtcttcctgagaaattcctgagatagcggacaacctgtggacttggcgacctaatgctaacagctctgacagactagtgctaacaacttagcaacaaagcatcaagaagcctggggtggcaggggatgggcctcccccctttataagagcagactcttagtaaactttgggccatgattggaaaaaaaaaaa

SEQ ID NO: 518 - DNA, 155 bp, Mus musculus
  misc_feature (1)...(155): n = A,T,C or G
aaagactgaggtgggtttgggctgagctcgagtcctcatcactctgctcactggagcttgagctcgagtcctcaggnctaagtnggnagntcgangancnggaacngaaccnntgaacctgcaagccagccccaattaaatgttgtcctttttaa

SEQ ID NO: 519 - DNA, 284 bp, Mus musculus
  misc_feature (1)...(284): n = A,T,C or G
atatgactgaagagaancgtgangaagatgcatgcnancgtgaatcccagcttgctacagtctacgttncanctctatncgnttacactttgcacactncanannaaagactcagaaacatcncctgctatggaatatacccacgncngcatccctgtcnncancagncttnttccnaggagacangaaataattattaaagaagaagaggaagaggaagaggaagaggaagaggaagaggaagaggaagaggaagaggaagaggaagaagaagaagaagaaga

SEQ ID NO: 520 - DNA, 307 bp, Mus musculus
  misc_feature (1)...(307): n = A,T,C or G
agactgatgtggggtctttnnaatgaacactgcagtaaagcaacacggaggaccacccagctctgtgctcagaagaggatgcagcataccgaccagacacttggtatagaaatgattccgggctggtgagatggctcagtgggtaagagcacccgactgctcttccgaaggtctggagttcaaatcccagcaaccacatggtggctcacaaccatccgtaacgagatttgncaccctcttctggagtgtctgaagacagctacagtgtacttacatataataaataaataaatcttaaaaaaaaaaa

SEQ ID NO: 521 - DNA, 398 bp, Mus musculus
  misc_feature (1)...(398): n = A,T,C or G
ccagttaaactttttaaacccttggatttangaaagccctccgggaatcaaacgggagccgctttggactgactggctgcctttntcctcctccccctcctcccccttctgcntttnatttatntattatatgtaaggacactgtaacanttgtaggacacactagacgagggcaccagatctcattgtgggtggttgtgaaccacccaccatgtggttgctgggatttgaactcaggatcttcagaanancagtcagggccctaaaccgttgacccatttctccagcctcctgnattcctttttaaggcatgaatgatcccnncttangannacagtcttgccctccctccttttntagccatttttcctttcnccatatnctcaaattaaaatcaa

SEQ ID NO: 522 - DNA, 207 bp, Mus musculus
actgaggcttggtgcctgcagagacaggagacagagaagacagatggagcatgtcggctcccctgagattggagtgtgaggtcgttgtgagtcaccatgtgcttgctccgaactgaacctaggtcctctgcaggagactcttaattcctgagtcatctctccagcttctggcattagtacttttttaatgtgagaaaattaaaaaaa

SEQ ID NO: 523 - DNA, 306 bp, Mus musculus
  misc_feature (1)...(306): n = A,T,C or G
cccgtgtcaagttcaagaccagcntggactaaacacacccctgtctcaaaaataagaagagaggagagaggaagagaaaaaggatgaggaggaggaagaggaggacgaggaggaccgaggacgaggaggaaagagaagaaaggaaatccacaatgtggtagttnngagatgggtcagtttaacagaaaggcagactgtacacatttaaccctcttttgtagtttgaataagaatggtttgcataagtgcatagacttgaatgcttggtcaccagggagtggcactattatttgaaaggattagggg

SEQ ID NO: 524 - DNA, 210 bp, Mus musculus
  misc_feature (1)...(210): n = A,T,C or G
ttttttgacctctgaggacattgggcatgcctggcgcattnatttacatgcaagcaaacgcctgtacacgtaaaataagtaataaaagtctttaactcntgaaaaatncatnaatggntgntgncttgctccctncttgntgatnatggactgaacctntgaacctgtaagccagccccaattaaatgttgttctttataagaaaaaaaa

SEQ ID NO: 525 - DNA, 120 bp, Mus musculus
caccctgagaaagtgtgctgagaaccatgaagaaaacaagagctgggtgtaacagcacttgggacgcagtgagttccaggctagcctgatctacatagagaaagcctaccaagagaagaa

SEQ ID NO: 526 - DNA, 162 bp, Mus musculus
  misc_feature (1)...(162): n = A,T,C or G
ttatggacagagaactctnangttcctgttctggccaccctgagaaagtgtgctgagaaccagaagaaaacaagagctgggtgtaacagcacttgggacgcagtgagttccaggctagcctgatctacatagagaaagcctaccaagagaagaaagaaaaaa

SEQ ID NO: 527 - DNA, 180 bp, Mus musculus
agactgaggtctcagaagtcagaagaggtcagtcagctcccctggtggagctggagctacaagcaactgtgaaaactactctgcatattactcttcaaaagcagtaacaagtgatcttccacccctctgcctctcctctgcaagaacagcaagtgctcttaacctgttagaaaaaaaaaa

SEQ ID NO: 528 - DNA, 391 bp, Mus musculus
  misc_feature (1)...(391): n = A,T,C or G
acatgccaagcttcagctgaaactcaagcctcatgcagttttctctgcttggaatgttctctgcccagccttcacctgcccagcttcttgtcctacaggtctcaagtcaaatgccttcttctcagtgaagacttccctggccaccttgtcaacataaatgtcatctggttattctctctccagcctgtggcctattttttctaaagaacttttcagaatctcatccatatcttggtttacttgtttgtaaccagngtctctcctccagaatgtaagctccaggagagcagcacttcctccttgatgntattcctgcttcaatccttagcgtctagcccagtgcttaatacagatttgntgaataaagatccattaaagcgaaaaaaaaaaa

SEQ ID NO: 529 - DNA, 212 bp, Mus musculus; identical to SEQ ID NO: 477

SEQ ID NO: 530 - DNA, 226 bp, Mus musculus
  misc_feature (1)...(226): n = A,T,C or G
agactgaggtaccaaagactgacaatgctagctttngngctggagcaatgacttgttggttaanagcactgactgntcttccaaaggtcctgagttcaatttccancaactacacantgactcacaaccaaccatctgtaatgagatctgatgccctcttntggtgtgtctgaagacaactacagtgtactcatatacataanataaataaataaacatttttaaa

SEQ ID NO: 531 - DNA, 200 bp, Mus musculus
  misc_feature (1)...(200): n = A,T,C or G
tctttctgcttcttaagctgtttcttcagggctaggctggaacctangcttgcgagcatggtaggccaggactatgccactgaancacacctccagcccctcactggagggctccaancaccncgngggnanctctnaccacttggggccctgcctcaaatnntttactgggggactntaggtggctggggttcctttta

SEQ ID NO: 532 - DNA, 255 bp, Mus musculus
caactgaggttcgaggtccccctcgcacccacgaataactgaatcccgcgggacaaggataagaacccaggactaccagcccagggatggcaccactcacaatgggcccttccaccccttgatcacgaattgagaaaatgccttacagctggatctcacagaggcatttcctcaagggaggctcctttctttgtgataactccagcttgtgtcaagttgacacacaaaaccagccagtaaacattgctaagacaa

SEQ ID NO: 533 - DNA, 352 bp, Mus musculus
  misc_feature (1)...(352): n = A,T,C or G
gactgaggactatttaacaaactgcaatcaacagcaatcaacagctatgaaccagcaacctaccctgcctcttgggaccctagcatttatataccctctgaagagttcccagaattccagatgtcacactatcacagaaactatcctcagctggcaaaaaatcatacccctgctagagcatgaggcaaatcatagtcagctgctgtggacagactgaaccagccccataccacacctgggattaaaacaaaaacatgttcttatatnanngaaanncttttnctttttttgtngaacatgattttaatattttcaactgntaatattcaacaaacagaataattatttagaa

SEQ ID NO: 534 - DNA, 275 bp, Mus musculus
  misc_feature (1)...(275): n = A,T,C or G
cctgagggtgaggctttttgcatgaaacaaagacttacccacccctcctccaaataccaagactatgggcttaaaagtttcaaatgggtgctggagagatggctcancagntaagagcaccgactgctctttcgaaggtcctgagttcaaatcccagcaaccatatggtggctcacaaccatctgtaatggaatctgatgccctcttctggngtgtctgaagacagctacagtgtactcacatatataaaataaataattctttaaaaaaaaaaa

SEQ ID NO: 535 - DNA, 352 bp, Mus musculus
  misc_feature (1)...(352): n = A,T,C or G
gatgaatggctggagnatggggagacgtacaacgggcatctggngagctgtgacaactggctgntgatnntcctttgntgnntgatntnggactgnncntgcngnnctcctgncttgaagcttagaactcgcctaaataactacttctanacaggtccncacatgcccntgannctaataaccgtttctctnccctacgctctcntgntggctctatagagggagatagatgcnttnatgaacncnaaataagaataggctttgaaacatnggagtttgcaaaggtcanagggcagatatgaagggatggggagatgagtggaattgtggtataagatgtgaaacaaagaat

SEQ ID NO: 536 - DNA, 184 bp, Mus musculus
  misc_feature (1)...(184): n = A,T,C or G
cacactagatttttgacaaanaagccaaaaccatacaatggaaaaanngaaagcatcttcaacagatttgtgctggtataactggatgtctgcatgtanaagaatgtaaacagatccatacttatcacctgtgcataaaactcaantccaagtggatcaaagangtcaaataaaaactggacat

SEQ ID NO: 537 - DNA, 248 bp, Mus musculus
  misc_feature (1)...(248): n = A,T,C or G
ctgagattgctgccaggctatgggtgncccagntactgacaggaccacaccattgctgtctttaagaaacttgctgggggctggcgaganggctcagtggttaagagcatcaactgcttttccgaaggtcccgagttcaaatcccagcaaccacatggtggctcacaaccatccgtaanganatctgangccntcttctggangntctgaagacagctacagtgtacttacatataataaataaatat

SEQ ID NO: 538 - DNA, 312 bp, Mus musculus
gactgaggctggctgactcaccagtgtttgctgctcagatcctgctgcaggaggcccagcacccgggtgaggaggacccctacctcctactctacaagcacaatgtgccagaatgtacggccaactcgtcgggaatcctctgcacagtaatgacatgaccgatcctcttccagctcaaaagataatgtgtgaactctcagctgctgctcgagcatcatgcctgcctgtctgccactttgctccccggccatgatcttggacaacttaaccctctgaaactataagcaagcttcccaataaatgctttcttgt

SEQ ID NO: 539 - DNA, 254 bp, Mus musculus
agactgagattgctgccaggctatgggtgtcccaggtactgacaggaccacaccattgctgtctttaagaaacttgctgggggctggcgagatggctcagtggttaagagcatcaactgcttttccgaaggtcccgagttcaaatcccagcaaccacatggtggctcacaaccacccgtaaagaaatctgatgccttcttctggaagatctgaggacagctacagtgtacttacatataataaataaatcttta

SEQ ID NO: 540 - DNA, 276 bp, Mus musculus
  misc_feature (1)...(276): n = A,T,C or G
acagctgcgcactttatactgaggccaggaaattatctangcgncaatagggtancccntcngnnngcttnatgaantngtgtcncaacaatacaattnganccttgacnaaacaggattttagggtatgttnaatttttttccagtaagctattggatccaagaaaacatcaaaaagatatccaccatgatcaagtaggagagattcaggggtggttcaatgtatgtaaattgataagcataatccaccatataaacaaactggaaggcaaaaaa

SEQ ID NO: 541 - DNA, 255 bp, Mus musculus
  misc_feature (1)...(255): n = A,T,C or G
gagggagcccgaaccaacagctgccatggcgtcacgcatcgggctgcgcatgcagctcatgcgggagcaggcccagcaggaggagcagcgagagcgcatgcagcagcaggctgtcatgcattatatgcaacagcagcagcagcagcagcagcagctgggtgggccccccaccccagccatcaacacccctgtccacccccagacctcccactttgtgcctttagnaaacactgngctttgttaataaataaaaaa

SEQ ID NO: 542 - DNA, 412 bp, Mus musculus
  misc_feature (1)...(412): n = A,T,C or G
ctgccaacaaacccatgtgaacatcacccngatcntgctgnncacnctggngactnaaagatgttaaagatgccagagccatgggatacatggtgaggaaagctgctnacagggagtagaaccagcccaggaaaaagcagtttgttgcagtcaacagagatgaaaaaggagtggagagctgaagactgctttgacatcagccatggagatgcagagtttggagtttgcccagctgttttcctgtctttctttgggtattacagnnaagngattggatgaatctcagaagagaccttgaactttagacttttaacattgttgagactgctagaaactatgaggactttgaaagttggactaaatgcatctttgcattatgatatgtttaagtaatggtgccccataagacctg

SEQ ID NO: 543 - DNA, 254 bp, Mus musculus
  misc_feature (1)...(254): n = A,T,C or G
atagactgaggttatataaacagtaagaactgctgaggagaacagactatgcctgctgcctggaanagactcagacctgcctgaaggagagattctctgtcctgttgagctctccacaagtagtgtaatgaactccagggttcctgctcttggtgatgtagctatatttgagttgaccctgcccctgcccttgcccttttacttatattcttgtgaataactctaataaactcattggattaccaaaaaaaaaa

SEQ ID NO: 544 - DNA, 355 bp, Mus musculus
  misc_feature (1)...(355): n = A,T,C or G
agactgaggtggagtagaggaacacctttcatcatccgagggagactctgagtcctntgacagttcagganacacagtgcanaggaagagtgcttgagcaattttccagcagnacgtggtcttttgaagtctgaacttaaatatggatgggttggatgttgccaaaaacagaaggaaggggagaacaatacanngatggaaagtatctttgacnnanctacaaaagggnctgagttcnnntcccntcngccacttggnggttcacaaccatctgtaatgagatctgatgccttcttctggaatgtctgaaaacagctacagtgtacttacntataataaattaataaataaaaaa

SEQ ID NO: 545 - DNA, 388 bp, Mus musculus
  misc_feature (1)...(388): n = A,T,C or G
agactgagtgacagatgaccgcacccactttatccaccattcactcctgcacattgcaacagtggagggaagganacncntanaacgggttcctcctaccctggacnacagtnncaccattacagagctgntgcatgtttgtctgngangaanacaggatgtatttncaccantcngnagtcttttaaaaaatgatttagggctggngagatggctcagnggttaaaagcgtcnactggtcttccaaagggcctgagttcaactcccagcaaccacatacatggtggcctacaaccatccgtaacgaaatctgatgccctcttctggagtgtctgaacacagctacagtgtacttacatataataaataaatgaataaatatttttac

SEQ ID NO: 546 - DNA, 177 bp, Mus musculus
  misc_feature (1)...(177): n = A,T,C or G
attgctgccaggctatgggtgtcccaggtactgacaggaccacnccattgctgtctttaagaaacttgctgggggctggcgaaaatggcttcatgggttaagagcatcanctgcttttccnaaggtccnggagttcaaatcccagcanccacntggtgggctcacaaccacccgtaa

SEQ ID NO: 547 - DNA, 166 bp, Mus musculus
  misc_feature (1)...(166): n = A,T,C or G
tgcgtaaacttggtttcaaagcctatgaagtgacgangggagggacnnatagtccagaaggcatccttcaatacataatcnaatccagcctggnctacagcgtgagttccaggacaaccagggctacacagagaaaccctgtctcaaaaaaccaaaaggaaaaaaa

SEQ ID NO: 548 - DNA, 332 bp, Mus musculus
  misc_feature (1)...(332): n = A,T,C or G
cactgaggcaagaccccgtcagaagagttaggaaaggactcacangaaatgaaggggattgcaaccccataggaagaacaaatcaacccactggaccacaaagagcatccagggactaaaccacctaccaaagagtatgcatggagagatgcatggctccagcactatatgtagcagaggatggattcatctggcatcagtgggagaggaggcccttggtcctgtggaggcttgatgccccagtgtagggcgatgctagagcagtgtgaatctggagtgggtggaggcaaagaggagagggggatggggatggtgagtgtgtggaggggaaa

SEQ ID NO: 549 - DNA, 203 bp, Mus musculus
  misc_feature (1)...(203): n = A,T,C or G
aggcagaacaatcaagttgaaagttatcctctgcgacataaaaggctcaagccagctggagaggtggctcaaagggtaanagcactgaggtcctgagttcaaatcccagcanctacttggtgactcacgaccatctgcaatgggatccaatgccctnttctggtgtgnctgaagacagctacagtgtactcatctatatacag

SEQ ID NO: 550 - DNA, 315 bp, Mus musculus
  misc_feature (1)...(315): n = A,T,C or G
ctgagcctcccccagccctgaagcaggttgattcagacttgacctcgctgccgctgagcatgagaccacctggggtggagccttccgacctagccggctctattgttctgtcacctgctgctgctcgtctccaagacactgctacctgctgaaaggcccttgagataatctggagacagcatccagccgatcacctactggctggcgaagggcaccaagaatggattgtttggggggggcgggggaggaatggtgggatggggatgggcggcccctctttataagtacagactcttantaaactttggggccttg

SEQ ID NO: 551 - DNA, 236 bp, Mus musculus
ctgagtgttttgcctgtgtgtatatatgtacaccgtatgtacaccatgtcatgagcctccatggtcgtgagaggactttggatcccttggaactggcgttacattggtcgtgagcctccatgttggcgctgagaagcaaacctgggttctctggaagcgcagcaagtgctcttaaccatcgagccatctctccatctcaaaccacccatgtatataaaatgaaaatacataaacca

SEQ ID NO: 552 - DNA, 186 bp, Mus musculus
  misc_feature (1)...(186): n = A,T,C or G
gagctcgagtcctcgtcgctctgctcactgggtcctcgtcactctccactggttctgccatggctccggtaggtccagagttnaaatcncancaaccacatgggggctaanaaccatccgnaanaanatctgactccctcttctggagtgtctgaanacagctacagtgtacttacatataataaa

SEQ ID NO: 553 - DNA, 206 bp, Mus musculus
  misc_feature (1)...(206): n = A,T,C or G
agtcctcatgtgtagctagggagctctgtcaaaaaaagcttgagctcnagtcctcatnactctgccatggctccggnnggtccagagnnnaaancccaccanccacatggtggctcacaaccatccgtaacnagatctgactccctcttctggagtgtctgaanacagctacagtgtacttacatataataaataaataaatcttt

SEQ ID NO: 554 - DNA, 157 bp, Mus musculus
gtaacttgggttcaagcctttgaagtgacgacaggagggacagaagtccaaaggcatccttcaatacataatccaatccagcctggtctacagcgtgagttccaggacaaccagggctacacagagaaaccctgtctcaaaaaaccaaaaggaaaaa

SEQ ID NO: 555 - DNA, 265 bp, Mus musculus
  misc_feature (1)...(265): n = A,T,C or G
ttcttgggttcaacctatgaaatgactacnggggggncggaggtccaaaggcatccttcaatacataatccaatccagcctggtntacaagcgtgagttccaggacaaccagggctacacagaaaaaccctgtctnntntgaccccgnacgctccaacatgagggggggnggnnntgnanattttttccccattgcgggttgtatggctnnnattcactttnctcaccatngacccnttggaccttnattacataagaattataa

SEQ ID NO: 556 - DNA, 307 bp, Mus musculus
  misc_feature (1)...(307): n = A,T,C or G
gtttatggtctggtgctggtaaaaatgacaacaatattcaagcctgcatgtttccgaatatcttttaccattgtctgggtgctatagtttctgcatttctgaagtctacagagctacatgcagtcaaagatcattgngatggtttgtatatccttggaccagggagtggcaccatctgaaggtgnggccttgttggaataggtgtgacctggttggaatgggtgtgtcactgtggggtgtgggtataagatcctcaccctagtttgcctggaagtcaagtcttccactagcagccttttgggatgaa

SEQ ID NO: 557 - DNA, 152 bp, Mus musculus
  misc_feature (1)...(152): n = A,T,C or G
taaacttggtttcaaagcctatgaagtgacgactgganggacagaagtccaaaggcttccttcaatacataatccaatccagcctggtctacagcgtgagttctaggacaaccagggctacacagagaaaccctgtctcaaaaaaccaaaaa

SEQ ID NO: 558 - DNA, 252 bp, Mus musculus
  misc_feature (1)...(252): n = A,T,C or G
caacaaagtttctctgtgtagttctggctgtcctagaactcagagatccacctacctctgattcaaaggactaggattaaatgcccggttaaagaagatactccagggctggagagatggctcagtggttcagatcacagactgctcgtccagagtcctgagttnaattcccagcaaccacaaggtggctcacaacacctcttctggtgtgtctaangacagcgggcgngggtattcatgtacattggggga

SEQ ID NO: 559 - DNA, 172 bp, Mus musculus
  misc_feature (1)...(172): n = A,T,C or G
ctgagcactgcgtaaacttggtttnaagcctatgaagtgacgacaggagggacaagaagtccaaaggcatccttcaatacataatccaatccagcctggtctacagcgtgagttccaggacaaccagggctacacagagaaaccctgtcttaaaaaaccaaaaggaaaaaaa

SEQ ID NO: 560 - DNA, 153 bp, Mus musculus
  misc_feature (1)...(153): n = A,T,C or G
acctgtggacttggcgacctaatgctaacagctctgacnnactattgctaacnacttancaacanagcatcaagaancctggggnggnaggngatgggcctcccccctttataanagcagactnttaataaactttgggccatgattggtaaa

SEQ ID NO: 561 - DNA, 256 bp, Mus musculus
  misc_feature (1)...(256): n = A,T,C or G
tgtaatggaatccgatgtcctcttctggtctgtctaagagatctacagtaaataacntgnnacctgntagnnaaagagngnnagctanctggtcattgaatgangccantccctctgctggaacctgcggagccacacaccgtgcacctttctactggaccagagattattcggcgggaatcgggtcccctcccccttccttcataactagtgtcgcaacaataaaatttgagccttgatcagaaaaaaaaaccct

SEQ ID NO: 562 - DNA, 144 bp, Mus musculus
  misc_feature (1)...(144): n = A,T,C or G
gtaaacttggtttcaaagcctatgaagtgacgacaggagggacagaagtccaaaggcatccttcaatacataatccaatccagcctggtctacagcgtgagttncaggacanccaggnctacacaganaaaccctgtctcaaaa

SEQ ID NO: 563 - DNA, 219 bp, Mus musculus
  misc_feature (1)...(219): n = A,T,C or G
gaccctgaatggagagtaaacctgctgcaggaccatgaatggagagatttgggtgtagtctcccctcccccagcctgaaacctgcttgctcaggggtggagcttcccactcaatctttttgccacgcctactgctggaacctgccgctttgctgttccaaagccatcacgtgatcaccctgctactggattccaanattatttggcgggaattaggctc

SEQ ID NO: 564 - DNA, 335 bp, Mus musculus
  misc_feature (1)...(335): n = A,T,C or G
gactgagtaagcaggagtggttcaagtgtccacacaaatcggggacctgaagctggcnccaagatgaggagtgaggatcccacaggagcggttatacagaatgtgganacccagagcaaaatcagctgctttaaaaacctatgctggggctggngaaatggctcagggggtaanagcacctgactgctnttccaaaggncnggagttcaaatcctagcaactacatgggggctcaaaaccatccataacganatctgactccctcttntggagngtctgaaagcagctacagngtacttacatataataaataaataaatctttaaaaaaaaaaa

SEQ ID NO: 565 - DNA, 289 bp, Mus musculus
  misc_feature (1)...(289): n = A,T,C or G
cagactgagagtaaacaagccaagctgctgacaaggaaggctctgaagagtggtaagctgcananactctgagctggaanaaacaganaccagcttagctgcctggaagagggttagaccaaccgaggctcctgcaaaggacactctcaaatgtgttganatgcccacaagctgtgccgngtgcttcaggttcccatgctggggggggccttggtcatgcagctgtctttgagtcatttttgctcctgtaagtatccctaataaaactcattggttcacgaaaaaaaaa

SEQ ID NO: 566 - DNA, 274 bp, Mus musculus
  misc_feature (1)...(274): n = A,T,C or G
aaatgggctgccgagatggctcagcgggnaagagcactgactgctcttctgaaggccctgagttcaaatcccaggaaccacattgtggctcacaaccgtctgaagacagctacattgtacttatgtataataataaataaatctttgtgctggagcaagcagggaatgagcagagctgactggagcgagcagaggtcctaaaaattcaattcctaataactacttgaaggctcacaatcatctgtgtactcacataaaataaataaatctttta

SEQ ID NO: 567 - DNA, 194 bp, Mus musculus
caactgaggttcagtgtatcctgttttatattttggtctttgacccgtttggacttgagttttgtgcagaggaataaagtatggatctatttggattcttctacattctgacatccagtttgaccatcaccatttgttgaagaagctgtctttttttccagtgtgtatttttggcttcgttattaaaaaaaaaa

SEQ ID NO: 568 - DNA, 218 bp, Mus musculus
gccagactgaggtggggtctttcagcttcagcatgtgcgtctgtctcagctgatattactctgccaatcagcctgagtccctggaagtggcaagaaactgcagtacaccaccagaagatttttttttactgtgattctctctatggagtcctgacaaatgcagctcaactatgcaatgtaagatggaccaatacatgcatgttgttaaaaaaagaaaa

SEQ ID NO: 569 - DNA, 334 bp, Mus musculus
  misc_feature (1)...(334): n = A,T,C or G
agaactgagaatatgaactagttatcaatggacaagcacttgagggtccagatacaatacacagaaggaggctggcgagggtgaatgaacttcagaggtgagagatatttgaaagccanattcancagcctggngtgatagtgagcttgnaatgttancacgtgaggngggagatccatcaacacgnataggggctgagctcaccatggaagctcccagntaccgctccagtgcgatgcctgtctgcccactgtcatgctccacgccacgatggccatggactctaatgctctgtgactgtgaaccccaataaactcgttcttttataaaaaaa

SEQ ID NO: 570 - DNA, 487 bp, Mus musculus
  misc_feature (1)...(487): n = A,T,C or G
tacacaaacctatgggggccattcctgaanngnaaactcaatggtccttngaaaagncatgatgtgntgganggcgcananacgngaangaatgttntcccaaagnggacacnggtgaaaggctanggcanacttgtgaaggaatgtttcactgaaaagatgttctgctnacgaaagcacgtgaaaggacgcgtgangaangattctttgctaaggacatgcgtgtattggtccacctcacatnttttactgagctccacatgttgagattccatagacaggagtgcaccaaaaaagttctggtggtgtgccccagcttnttgccacttctgcggactcagtctgaccggcagagtaatgtcagctgagactgactcacgtgctgaaacaagacgtatgcttgaggcaagacccgtggaagaaacgtgatattgggagggtttanaaaccccnccgggcatntttcacttnatctgcactttcttta

SEQ ID NO: 571 - DNA, 248 bp, Mus musculus
  misc_feature (1)...(248): n = A,T,C or G
ggacccaatcaaaggcagcccaaccatctggaatctggaagaagctgggtctagcactcggaaggcagaggaaggcggatatatgagttcgaggccagcctggtctacagagcaagtttcaggacagccagggctaacacagagaaaccctatcttgaaaaacaaccaaaaggggaaaaaaatcaatctggaagaaaagctggcttattagggctaatagtgngggatttaaatatatacaaccatgg

SEQ ID NO: 572 - DNA, 420 bp, Mus musculus
  misc_feature (1)...(420): n = A,T,C or G
ctgattggaagtaaatgatgacaagaccctaggggataaaagattcacgaaagagaaggaacctgaatccctgaatcaccgtatggaagaaaactgccagccaaccagaaaaatctatcatggactgtcatagaataaagcctaaaattaaggctgaatattacgtgctgctttgacatctggtaaacttggagaacttcgaatgacctagttgcaagctttccttctcactctgctcctgtggataaggngccatagccaagcaaccgtccttatcagagaacccagtcacagtttctgagcaatgggtttcagtttaccaccagcccacagaattattcaaacaagccaatgacatcctcttcagggaactagggagcatctttccctactgatactacaaagcctggcttccataat

SEQ ID NO: 573 - DNA, 388 bp, Mus musculus
  misc_feature (1)...(388): n = A,T,C or G
gtcaatgcaaatcctgccaggccaagaaacaggaaaaatataaacaccagtgatagagacaggaggcagccaaggacccctcctgcccccaacacctgacgaaatgccgccttcaagcctaaaacagcatgagggatgaaaaaccagactgccggtccggatgaagcccacccttttccccaaatgattctttctgaataacgcccatctgcacattgggaggagggggtggggccttgggaagtttgcactgtttgcaggggggaggagcctggtctctctcgtttctgtgtgggtaaggtgggatttaattccctgagatggagagcctgttagcagggactcttatctcacttttgcttgatgccgnatttccttttttcatttc

SEQ ID NO: 574 - DNA, 135 bp, Mus musculus
gaactgagagcccttggtgctaccacttctgagcatctggatgtctctgcagttgttggggtactactagtgtgtctgaagacagctacagtgtactcatatcaaatatataaatatttaggggaaaaaaaaaaa

SEQ ID NO: 575 - DNA, 282 bp, Mus musculus
  misc_feature (1)...(282): n = A,T,C or G
agcacgcaccccaagccccagcaaacatggagattngaggacaactngggggagtccttactccccttctaccacgtgttccttgacggaacctaggttgccaggctaccggctggtcatcaggccaggncctcttcagatcaaagcagcgtcctcctgaagaactgttttagtccactcgagctgctgtaacaagttcccagagcctgggtggcttccaccaaaggaggtgctcgtgtctcagagttcacagttccggaagctggaagtgtgaggtcaagg

SEQ ID NO: 576 - DNA, 133 bp, Mus musculus
caactgagagcccttggtgctaccacttctgagcatctggatgtctctgcagtgttggggtactactagtgtgtctgaagacagctacagtgtactcatatcaaatatataaatatttaggggaaaaaaaaaa

SEQ ID NO: 577 - DNA, 376 bp, Mus musculus
  misc_feature (1)...(376): n = A,T,C or G
ccaactgaggctccttgatcatgaaggccnncctgtgcacaagacganncttacnccttgtctgncatctcagaggaaggggcttggcncagtccatnnntccactattggaaggagtggtgatgggcgcctgtacatcccagctcttgggaagctgagacaggagattgtaggtttgaaggcagtctggagtatatagtgagccccagaccaatctagactgcatatggatgtcttgtctttaacaaagactttagtctagacaaaaaaataactgaaagaagcagaatcaggtccagagagaaggctcagccgcttaaggagttgttatcagacctgaaaacctgagtcttacctgggacccagatagaggcat

SEQ ID NO: 578 - DNA, 183 bp, Mus musculus
  misc_feature (1)...(183): n = A,T,C or G
ggcaacagaccttctaatgaantatgcactacacgttcaaagtgacattttaaaacancgacaacgacgacaacaacaacaacaacagcagcagcagcaacaaaaccctcaagactgactctgcattanaaagctgcagtccacccttgtctttcatggngacaantcttctgaggagattaa

SEQ ID NO: 579 - DNA, 258 bp, Mus musculus
  misc_feature (1)...(258): n = A,T,C or G
gaacggtacaactgagatggcagctcgaggtgaaagagaggaactagacagacggaagaaagaacggagccaagtcaaagtggactctgatcaaagctcaattttactattccaacacgcagttatgaaggaggggaagggggggccgattcccgccaaatantcctggagtccagtagcagggtgaccacgtgtntggctccagaacagcaaagcagcaggttccagcagtgggcgtggcagaacgattgaggggca

SEQ ID NO: 580 - DNA, 247 bp, Mus musculus
  misc_feature (1)...(247): n = A,T,C or G
cctcccccagccctgaagcangttgattcatgacttgacctcgctgccgctgagcatgagaccacctggggtggagccttccgacctagccggctctattgttctgtcacctgctgctgctcgtctccaagacactgctacctgctgaaaggcccttgagataatctggagacagcatccagccgatcacctactggctggcgaagggcaccaagaatggattgtttggggggggcgggggagggaa

SEQ ID NO: 581 - DNA, 275 bp, Mus musculus
ctcctgggatcctgtgaccctctgatcctggatgttggagcacctgggattaagagctgcctctgggtattttgtggttggctgcagagtttacacccaaggtctgctcagggcatgggcccagacagaccggaaggaacccatgctggcggaattcctgcatgcctgggtgtcaccggtcctagttactcccagtgttggggacagatgttatgtcctcctcacctctgatcctctcatttttttaagaatttgacgaataatctttataaaag

SEQ ID NO: 582 - DNA, 320 bp, Mus musculus
  misc_feature (1)...(320): n = A,T,C or G
gaactgagggttccaaggactgccctttgggattcaaacgggagccgctttggactgactggctgccttcctcctcctccccctcctcccccttctgcttcagatttatttattatatgtaagtacactgtagcagttgtaggacacactagacgagggcaccagatctcattgtgggtggttgtgaaccacccaccatgtggttgctgggatttgaactcaggatcttcagaagagcaagtcnagggctctaaaccgctgagccatctctccagcctcctgcattccttcttaaggcatgaatgatcccagcaatgctt

SEQ ID NO: 583 - DNA, 170 bp, Mus musculus
  misc_feature (1)...(170): n = A,T,C or G
ccacactgagctttggnggcagccgacaacctttgnctagccttcaactggatactgnacagagttcttgcatttcttgaaaataaccgtttaaaaaaatgaaagaaagaaaagaaagaaagaaagaaaggaaggaaggaaggaaggaaggaaggaagaaagaaagaaag

SEQ ID NO: 584 - DNA, 216 bp, Mus musculus
  misc_feature (1)...(216): n = A,T,C or G
gtatatatgtacacgtatgnacaccatgtcatgagcctccatggtcgtgagangactttggatcccttggaactggcgttacattggtcgtgagcctccatgttggcgctgagaagcaaacctgggttctctggaagcgcagcaagtgctcttaaccatcgagccatctctccatctcaaaccacccatgtatataaaatgaaaatacataaacca

SEQ ID NO: 585 - DNA, 392 bp, Mus musculus
  misc_feature (1)...(392): n = A,T,C or G
tagaaacacatggatgaatgaatatccntatgaagaggaanaccntantgganggtnnctnaccgcgnntgcnccataagtgtcactattntntcgggaggnacnctgcgcatccccacgagcattanntctgcctgaatcatacagcanccatncaccgncctactgccgnntgcaagcnttaatgaccttnctntncctttaaacctacaagagntgccgctnntattgcaaaaacaggganatggctgttgctctttatacaagtgtactatcattatgatttcagacgtaatttttatttatttacttatttatttgtttgtttgttcacttattnggtgctatgcgtcatgtgtcgaaggctggcctcacgcttactgtgtccgagc

SEQ ID NO: 586 - DNA, 131 bp, Mus musculus
  misc_feature (1)...(131): n = A,T,C or G
agcactgaggtcaaactctaccattgcttgggtttttggatttctgagttcgagaccagcctgatatttacagagncagttccaggacagccaaggctacacaaagaaaccctgtctcgaaaaacaaaaaa

SEQ ID NO: 587 - DNA, 268 bp, Mus musculus
  misc_feature (1)...(268): n = A,T,C or G
gctgcttttgtagtcaagtccttganaggccgagggaggaggattgtgagtggaaggccagtttcagcctgaaacctgcttgctcaggggtggagcttcccgctcaatcgttctgccatgcccactgctggaacctgccgctttgctgcttggagccacacacgtgttcaccctgctactggaccccgagaccagttggcgggaatcgggttccctcccccttcctttataactgaatgtcggaactagtaaaattgagctttgaaca

SEQ ID NO: 588 - DNA, 313 bp, Mus musculus
  misc_feature (1)...(313): n = A,T,C or G
ctcccccagccctgaagcaggttgattcagacttgacctcgctgccgctgagcatgagaccacctggggtggagccttccgacctagccggctctattgttctgtcacctgctgctgctcgtctccaagacactgctacctgctgaaaggcccttgagataatctggagacagcatccagccgatcacctactggctggcgaagggcaccaagaatggattgtttggggggggcggaggaggaatggtgggatggggatgggcggcccctctttataagtacagactcttantaaactttggggccttgaaca

SEQ ID NO: 589 - DNA, 300 bp, Mus musculus
  misc_feature (1)...(300): n = A,T,C or G
cagcctggaacagttgatcagacttgactcgctgccgctgaacatgagaccacctggggtggaccttccgacctagccggctctattgttctgtcacctgctgctgctcgtctccaagacactgctacctgctgaaagcccttgagataatctggagacagcatccagccgatcacctactggctggcgaagggcaccaagaatggattgtttggggggggcgggggaagaatggtgggatggggatgggcggcccctctttataantacagactcttagtaaactttggggccttgaac

SEQ ID NO: 590 - DNA, 317 bp, Mus musculus
gcctcccccagccctgaagcaggttgattcagacttgacctcgctgccgctgagcatgagaccacctggggtggagccttccgacctagccggctctattgttctgtcacctgctgctgctcgtctccaagacactgctacctgctgaaaggcccttgagataatctggagacagcatccagccgatcacctactggctggcgaagggcaccaagaatggattgtttggggggggcgggggaggaatggtgggatggggatgggcggcccctctttataagtacagactcttagtaaactttggggccttgaacaga

SEQ ID NO: 591 - DNA, 318 bp, Mus musculus
  misc_feature (1)...(318): n = A,T,C or G
gcctcccccagccctgaagcaggttgattcagacttgacctcgctgccgctgagcatgagaccacctggggtggagccttccgacctagccggctctattgttctgtcacctgctgctgctcgtctccaagacactgctacctgctgaaaggcccttgagataatctggagacagcatccagccgatcacctactggctggcgaagggcaccaagaatggattgtttggggggggcgggggaggaatggtgggatggggatgggcggcccctctttatnagtacagactcttagtaaactttggggccttgaacagaa

SEQ ID NO: 592 - DNA, 320 bp, Mus musculus; identical to SEQ ID NO: 185

SEQ ID NO: 593 - DNA, 270 bp, Mus musculus
  misc_feature (1)...(270): n = A,T,C or G
gtggaactatgtgctnattnnaactgcaacgcccactgctggaacctgaggagncacacacgtgcacntttctacnggaccagagattattnngcgggaatcggntcccctnncnnttgcttcataactggtgtgagcatcgataaaatttgagccttgatcagnataacaaattangnacagcaaggncccantgcgtatggncagcnnggccagactccatactataaccagnaaagtcctcatccncagcagagcaccttacgccca

SEQ ID NO: 594 - DNA, 169 bp, Mus musculus
agactgccctttgggattcaaacgggagccgctttggactgactggctgccttcctcctcctccccctcctcccccttctgcttcagatttatttattatatgtaagtacactgtagcagttgtaggacacactagacgagggcaccagatctcattgtgggtggttgt

SEQ ID NO: 595 - DNA, 186 bp, Mus musculus
gggttccagactgccctttgggattcaaacgggagccgctttggactgactggctgccttcctcctcctccccctcctcccccttctgcttcagatttatttattatatgtaagtacactgtagcagttgtaggacacactagacgagggcaccagatctcattgtgggtggttgtgaaccaccca

SEQ ID NO: 596 - DNA, 169 bp, Mus musculus
  misc_feature (1)...(169): n = A,T,C or G
ccaagactgccctttgggattcaaacgggagccgcttnggactgactggctgccttcctcctcctccccctcctcccccttctgcttcagatttatttattatatgtaagtacactgtagcagttgtaggacacactagacgagggcaccagatctcattgtgggtggt

SEQ ID NO: 597 - DNA, 259 bp, Mus musculus
  misc_feature (1)...(259): n = A,T,C or G
cccagccctgaagcaggttgattcagacttgacctcgctgccgctgagcatgagaccacctggggtggagccttccgacctagccggctctattgttctgtcacctgctgctgctcgtctccaagacactgctacctgctgaaaggcccttgagataatctggagacagcatccagccgatcacctactggctggcgaagggcaccaagaatggattgtttggggggggcgggnggaggaatggtgggatggggatggc

SEQ ID NO: 598 - DNA, 362 bp, Mus musculus
  misc_feature (1)...(362): n = A,T,C or G
ggttccaagactgccctttgggattcaaacgggagccgctttggactgactggctgccttcctcctcctccccctcctcccccttctgcttcagatttatttattatatgtaagtacactgtagcagttgtaggacacactagacgagggcaccagatctcattgtgggtggttgtgaaccacccaccatgtggttgcngggattngaactnnngatctncanaagagcantcagggctntaaaccgctgagccatctctncagnctcctgcattccttcttaaggcatgaatgatcccancataggaagacagnctgccctccctccttttcgagccattttncctttcaccatatactca

SEQ ID NO: 599 - DNA, 365 bp, Mus musculus
  misc_feature (1)...(365): n = A,T,C or G
ggttccaagactgccctttgggattcaaacgggagccgctttggactgactggctgccttcctcctcctccccctcctcccccttctgcttcagatttatttattatatgtaagtacactgtagcagttgtaggacacactagacgagggcaccagatctcattgtgggtggttgtgaaccacccancatgtggtngcnggganncnaacnnncgatctncataagagcagtcagggctctaaaccgctgagccatctctccagcctnctgcattccttcttaaggcatgaatgatcccagcataggaagacagnctgcctncctncttttngagccatttttcctttcaccatatactcaataa

SEQ ID NO: 600 - DNA, 335 bp, Mus musculus
attcctcctgatattgtcaaatgaatcaccatcaaaagtagtttgaacagactggtgaacacagctgaagggatgttgaagggtccataccttgtagcttctgtaacagtcctttgccagctcagaaggggaattgactgcaacatgaacacagcccagcaagtgaatctgtcttagcaaaactccacgtgagtctgtatcaactgacattactgccaactggcctgagtccttggaagcagcaagaagttgccagcacaccaccagaagttttttggtgtgtttctctctatggagtcccaacaaataaagttcaactaggcaatgtaaaaaaa

SEQ ID NO: 601 - DNA, 331 bp, Mus musculus
  misc_feature (1)...(331): n = A,T,C or G
acactgagggttccaagactgccctttgggattcaaacgggagccgctttggactgactggctgccttcctcctcctccccctcctcccccttctgcttcagatttatttattatatgtaagtacactgtagcagttgtaggacacactagacgagggcaccagatctcattgtgggtggttgtgaaccacccaccatgtggttgctgggatttgaactcaggatcttcagaagagcagtcagggctctaaaccgctgagccatctctccancctcctgcattccttcttaaggcatgaatgatcccagcatangaagacagtctgaataa

SEQ ID NO: 602 - DNA, 173 bp, Mus musculus
  misc_feature (1)...(173): n = A,T,C or G
atgaagggctgcttctgaccatccacagcagctgactatgcacacctgaggcaccacacnacctgactggcctggaactcactgngtanatcgggctggccttaaactcactganatttgnctttntcctgcctgctgaaattaaagttgtgcgtcaccctgaaaaaaaaaaa

SEQ ID NO: 603 - DNA, 274 bp, Mus musculus
  misc_feature (1)...(274): n = A,T,C or G
gtaacagtacgtgtagcctcccccagcctgaagctggctgttncaaaccttgctgctnctgatantgagaccacctggggnggagccttccgacctagatggctccattgttntgtcacttgccgctgctctcctncaagacactgctacctgctganaggcccctgagatattccagaggcacatcctatcctgcacatcctcgcctgcangctggctccaggcaccaagaatggattggcgggggatgggctttcccctttttaagcacagt

SEQ ID NO: 604 - DNA, 121 bp, Mus musculus
gggattcaaacgggagccgctttggactgactggctgccttcctcctcctccccctcctcccccttctgcttcagatttatttattatatgtaagtacactgtagcagttgtaggacgttc

SEQ ID NO: 605 - DNA, 373 bp, Mus musculus
  misc_feature (1)...(373): n = A,T,C or G
gataagaggagtcctcaccctgcatcaaggaaacttctctttgccgtagatggagaccattgcagaaaactacaacagatcacaatacggagttgtggaacccagactcaagcgtancaactatttatgaaaaagatagctcaagaaaaaaaatttttgttngagatngggtttctccatgtagccctggctgtcctggaactcactctgtagaccaggccagcctctggttcagagatctacccacctctgcctnccaagtgctgggattaaaggtgcatgctactaattctggcttttaagaggccataaatttgaaagagagcaaagagggacatgcaggaaaatttgtagggaggaaaaggatgaagga

SEQ ID NO: 606 - DNA, 469 bp, Mus musculus
  misc_feature (1)...(469): n = A,T,C or G
cacacccatgtcccgccgcgaagtggaggacccacaagactctgngnngccgacggtgtctaggtcggnctnagagaaangntgacatcctnttacgggggcttattttccngccaagcatcattaagnatgnccaagatccttccatnttactgtacntcactgtccatnntcntgcangnnngannntgcnnggnccactgcncacacgnnagnttcctcccggncccgcccttcctcanggtcacgtcggattttttttttaagtaaacaatatgcttaagcataaagaagaaacaaaactggacagaggtcatgaatggcatatatactcacacaggaatgaagtatgcatggctcttctctganacaggattgctcaattatgtagctctggctgtcctanaactcaccatgcanaccaggctggccttgaattcacagagaatgtgacactgcctgtctctaa

SEQ ID NO: 607 - DNA, 333 bp, Mus musculus
  misc_feature (1)...(333): n = A,T,C or G
accggtccgacgacgccgatggcaccttcaactacagcccggacatatactgctccaagtaccgatgaggccaccggcctgtgtccagatggtgatgagtaagtggggttncggtgggtggctcctggtctttcctcaggattggtgttgactctctgatcaacaggtttttgaggtttctggttttttgcttttttgagacagggtgtctttatgaaggcctggctgtcctgaaacactgtatgtagaccagactggcctcaaactcatagtgatacctgtcttggccccttaaagtgctggcattaaaggtgtatgccactaaaaaaaaaa

SEQ ID NO: 608 - DNA, 370 bp, Mus musculus
  misc_feature (1)...(370): n = A,T,C or G
agaagagaggtcacagcagttgagacggggnnnttnnnagacagtggaagcagctgactctctctctaaagcatggctcaagtgtggagaaggntttcaggacacctctgagatcctgtcattagcaaagtgaaaagacaggtattactgaaaagcaccttggaattatctccaaaaccaggngacagagactttgaagttcttatcatacagatctcagagttgagcaaagaattctcacctgangaataccaaatggctgagaagcacctgaaaaaatgtncaacatccttaatcatcagggaaatgcnaatcaaaacnaccctgagattccacttcactccagncagaatgcctaagatcaaaaatt

SEQ ID NO: 609 - DNA, 100 bp, Mus musculus
  misc_feature (1)...(100): n = A,T,C or G
gcctgcgggggacaaantgtcatncattatatagccgtcannancagcnncagcagcagcngctgggtgggcccnccaccccagccatcaacacccctgt

SEQ ID NO: 610 - DNA, 204 bp, Mus musculus
  misc_feature (1)...(204): n = A,T,C or G
tgaggcttggtgcctgcagagacagggngaagagaagacagaggagcatgtcggctcccctgagattggagtgtgaggtcgttgtgagtcaccatgtgcttgctccgaactgaacctaggtcctctgcaggagactcttaattcctgagtcatctctccagcttctggcattagtacttttttaatgngagaaaattaaaaaaa

SEQ ID NO: 611 - DNA, 350 bp, Mus musculus
  misc_feature (1)...(350): n = A,T,C or G
ccgtggattcttctacacaccccatgtcccgccgcgaagtggaggacccacaagtgcaccaagtgnangcnngacccacgggagccagaaggtgttggatctcctggaaacatgaatcacagaaaggtgtgagctgccattcgggtcccaggaactacagccaggtcctctgaaagagcagccagtgctcttaacccccaagccatctctccagcctgagagtgcgtgttcttatcatgagaagacaaacagcagtggagttggcaagctgcctcagtgggtaaaggtacttgctgccaaggcttgcagcctgatttcgattcccagaacccacgagaatagaagtcgaa

SEQ ID NO: 612 - DNA, 324 bp, Mus musculus
  misc_feature (1)...(324): n = A,T,C or G
ggggagcgtggattcttctacacacccatgtcccgccgcgagtggaggacccacaagctcctgcttcctgacctgcttgagctcgagtcctcaaaagaaaataagccctactgacataggnagaatgacattttgcantganctcangnccttctgctaatgtcagactttgaccttagcagcaaggtttccccatagtaccacaatctcagtccaaaggcaacggtctaaagcccactggggcagcacataccaggttctacagacttacacaggaaatgagaatcacntctttcctcgtcagccaagtgagaaccacaaagg

SEQ ID NO: 613 - DNA, 449 bp, Mus musculus
  misc_feature (1)...(449): n = A,T,C or G
tgtcccgccgcgaagtggaggacccacaagaaagctcttgctgccctggaactcattctgtgaaggaggagggcctggaactcacagaagtctaccagactaagcctcatcagtgctaggattaaaagtgttcccatcaccaaccagcatgaagaaaatgtttaaggggacattggaagtgtgtccctgaaggaagacaaagccctccctaactcacagccattaaaagtttcctgggatcctgttactctcctgtacatttacagggatctcagtcttcaatgatggcgatgaaaacgttttctaggcctttgctctcggnatcttctcctccaattcctattattcttaggtttgatcttttcctagngtgccaaattccctagatgttttgnggncatgaacctttttagaatttttnattttgcttgagctcgagtgcttaacgc

SEQ ID NO: 614 - DNA, 261 bp, Mus musculus
  misc_feature (1)...(261): n = A,T,C or G
aactgagaatacagctgctntancatcgcccttnactggggnatcaagcctccacaggaccaagggcctcctctcccactggtgccagangaanccatcctctgctacatatagagctgaagccatgcttctntccatgcatactctttggtacccacaaagcaacttcattggaaacttttgccccaaggaatggctaatagctttccattatgtaaaaaattttgntgctgnttggaaacaagaagttaggacattgaa

SEQ ID NO: 615 - DNA, 387 bp, Mus musculus
  misc_feature (1)...(387): n = A,T,C or G
aattgctcgacagacgctatcgacccttanatgctgaatggcgcggaaccaactaagggtccatctctgtgatgttcctctttcagggacttttctcatgaagcttttctggctggttttgtgtgtcaacttgacacaaagctgaagttatcacagagaaaggagcctcccttgaggaaatgcctccatgagatccagctgttaggcattttctccattagtgatcaagaggggagggcttaggccattgtgggtagtgccagtcctgggttctataagaaagcaggttgagcaagccaagggaagcaagccagtaagcagcacccctccatggcctctgtatcagctcctgcctccaggttcctgccctgtgtgagttccagacct

SEQ ID NO: 616 - DNA, 107 bp, Mus musculus
gactgaggtaccaggcatgcatgtggtcccaggcatacttgccagcgcgagcatgcacatgcgcaccccccaccacacagagagagagagagagagagagagaggaa

SEQ ID NO: 617 - DNA, 272 bp, Mus musculus
  misc_feature (1)...(272): n = A,T,C or G
actgagggtctattttgttcctctgnctgtcctggaactnattgtntaaaccaagctggcctcaaactcacagagattttnttgcctttgnctcctaantgctgggattanagatgtgagtnacccaccccccaccccncaatccctgagctctcccccagggactggaccaccaaccaaagaatacacatggagggaacaggctgcaaatgtgacagaggatgaccttgttgaacatctnnctaaagggaatgggagaagcaaagaaaaac

SEQ ID NO: 618 - DNA, 192 bp, Mus musculus
  misc_feature (1)...(192): n = A,T,C or G
actgaggtttttggccacttgacccangtagtagttatttggggagaanctcaactgagaaagtgcctccatcagagtggccttgggcagtttctgcctccaggttcctgctttgagttcctgcccgacttcccctgaggatggacctgcgatccaaataaataaacaaattatccaccccaaaaaaaaaaa

SEQ ID NO: 619 - DNA, 385 bp, Mus musculus
  misc_feature (1)...(385): n = A,T,C or G
ggggagcgtggattcttctacacacccatgtcccgccgcgaagtggaggacccacaaggttganataccttgtttnaaaaatacccnngagaccacngtcttcatagcatcattattcatcatagtntaatgacatgaaaataatntagggggctggagagatgactcancagtnaagagcactgactgctcttccagagatcctganttcaatacccatnanccacatggtgtctcacaaccatctgtantgagatgtgatgccctcttctggngtgtctgaagacagctacagtgtactcntcatatatatataaaacnaataaataacntcttttttaaaagnggannaacaaccatntgnaatgagatgtgatgccctctt

SEQ ID NO: 620 - DNA, 206 bp, Mus musculus
  misc_feature (1)...(206): n = A,T,C or G
actgaggcttggtgcctgcagagncagggacaagacaagacagaggagcatgtcggctcccctgagattggagtgtgaggtcgttgtgagtcaccatgtgcttgctccgaactgaacctaggtcctctgcaggagactcttaattcctgagtcatctctccagcttctggcattagtacttttttaatgngagaaaattaaaaaaa

SEQ ID NO: 621 - DNA, 308 bp, Mus musculus
  misc_feature (1)...(308): n = A,T,C or G
tgagaaactgggctgctcctccagttaaaggacatcaatcatttcctaatgcaagacattgctttcctgtctggngcctaggaacccctggaacttgagttccaggngcttgtganctacgggacaccagtgctgggaactgaactttgncagtccctctgccagagcactgtcnacggngaaaccatctccccagtctctcaaatgtactttgctcaaaaattctttggaggagaggcccttggtcttgtgaagattatatgctccagtctagggggatgccagggccaggaagcgggagtgggtgg

SEQ ID NO: 622 - DNA, 307 bp, Mus musculus
  misc_feature (1)...(307): n = A,T,C or G
aactgagcctcccccagcccctgaancaggntgattcagacttgacctcgctgccgctgagcatgagaccacctggggtggagccttccgacctanccggctctattgttctgtcacctgctgctgctcgtctccaanacactgctacctgctgaaaggcccttgagataatctggagacagcatccagccgatcacctactggctggngaagggcaccaagaatggattgtttggggggggcgggggangaatggtggtaactggaccatacattnttgtctcaataaanacatgtttgaactact

SEQ ID NO: 623 - DNA, 238 bp, Mus musculus
  misc_feature (1)...(238): n = A,T,C or G
actgagggttccaagactgccctttgggcantcaaacgggagccgctttggactgactggctgccttcctcctcctccccctcctcccccttctgcttcagatttatttattatatgtaagtacactgtagcagttgtaggacacactagacgagggcaccagatctcattgtgggtggttgagaaccacccaccatgnggttgctggaatttgaactcacgatcttcaaaaaaacaa

SEQ ID NO: 624 - DNA, 100 bp, Mus musculus
  misc_feature (1)...(100): n = A,T,C or G
cctttctactggaccagagattattcnnctggnaatctgggtcccctncccgcttccttnataactgagtgtcgnaacagtaaaattggagctttgatca

SEQ ID NO: 625 - DNA, 205 bp, Mus musculus
  misc_feature (1)...(205): n = A,T,C or G
actgagaaagtctcgggctggtgagtaggctcagtgggtangagcacccgnctgntcttccgaaggtncggaagttcanatcccagcaaccacatggctggctnacaaccatccgtnacgagatctgacgccctnttntggagnggctgaagacagntacagtgtacttacatataataaatanataaatctttaaaaaaaaaaa

SEQ ID NO: 626 - DNA, 248 bp, Mus musculus
  misc_feature (1)...(248): n = A,T,C or G
tgactgcatgcttattgncttggggngnnntggcgttgctnagctgncntttcttacagcatccangaccagcagcccaggggtgacngagtgagctggtgccacagagagctgggccctcccacttcantcatcaatcaagaatggaggacaggggctggagagatggctcancggttaagagcnntgactgctcttatgaaggtcctgagttcaaaccccagcaaccacatggtggctcacaccat

SEQ ID NO: 627 - DNA, 393 bp, Mus musculus
  misc_feature (1)...(393): n = A,T,C or G
tcatgtcatgctaaggaacaaacccagagcttcatgcaagcaagcaggcatgcaagcaagcaagcaagcaagcaagcagccaacattttaccagctctgttccatccctagcccctttctcttctcctggggctggcgagatggctcagaggttaagagcactgactgcttttccagaggtcctgagttcaaatcccagcaaccacatgatggctcacaaccatctgtaatgagatctgataccctcttctggtgtgtctgaagacagctacactgtacttatgtataataataaatctttgggcaagagcgagcagaaactaagccagtgcaanttgactggagcaagcctnaggtcctaaaaattcaaatcccaacaactacatgaaggct

SEQ ID NO: 628 - DNA, 620 bp, Mus musculus
  misc_feature (1)...(620): n = A,T,C or G
gactgaggaatcccagcttactcaagtgcagcctcacaaaagaactcantctgcagcaggaggcangacagagctganctcccagcatcctntgccactgacaagacctgggcacacatcagaggtcctagctggcaccacaacttctgggtctgcaggcctgagaattcatgttcctagcaagttcccaggtgaagctgagttgctgctgctgttaatggcctaggtctgtctgcctgtntgnttgtntgtctgacaggatttcatgtagtttgggttgccctggaactccatgtgtagccaaggatgacctcgaactcctgatcctcttgcctggtgtcaaattgacacaggctggggttatcacagagaaatgagcttcagttgaggaaatgcctccacgagacccagctgtaaggcattttctcaattagtgatcaagagggaaaggccccttgngggtgggaccatctctgggctggtagtctcagttcagttctgagagcaggctgagcaagccaggagaggcaagccagtaaagaacatccctccatggcctctgcatcagctcctggttcctgacctgtttgagttccagtcctgacttccttggtgatgac

SEQ ID NO: 629 - DNA, 209 bp, Mus musculus
  misc_feature (1)...(209): n = A,T,C or G
gactgagagcttatccacaatgaagaaaagtanttggcttgaaatacattgaaatacaatgcttgccgggtggnggtgnatgcnngcctttaatnccancanttgntgaggcaaaggcnggtggatttctgagntnaaggtcaacctggnntacagaatgagttccaggacagccgggctacacagaccctgtctcgaaaaaaaacaaa

SEQ ID NO: 630 - DNA, 133 bp, Mus musculus
  misc_feature (1)...(133): n = A,T,C or G
ctgtggagccacacactngcacctttntactggaccaggagattattncggcgggaatnggntnccctnccncttgcttcataactgagngtggcaacagtgataattaggagctttgatcagaaaaaaaaaa

SEQ ID NO: 631 - DNA, 220 bp, Mus musculus
  misc_feature (1)...(220): n = A,T,C or G
gactgagggttccaagnnctgccctttgggcttcaaacgggaagccgctttggactgactggctgccttcctcctcctccccctcctcccccttctgcttcagatttattnattatatgnaagtacactgtagcagttgtaggacacactagacgagggcaccagatctcattgtgggtggntgancagcaaaattggagctttgatcagaaaaaaaaaa

SEQ ID NO: 632 - DNA, 142 bp, Mus musculus
  misc_feature (1)...(142): n = A,T,C or G
tggaacctgtggagccacacactggtgcacctttantactggaccagagattattcggccggnaatctggntnccntnccncttncttcataactgagtgtngcaacagtgaaaattaggagctttgatcagaaaaaaaaaa

SEQ ID NO: 633 - DNA, 188 bp, Mus musculus
  misc_feature (1)...(188): n = A,T,C or G
ttgctcaggggtggagcttcctgctnatttgttctggcacgcccactgntggaacctgnggagccacacactgngcacctttactactggaccagagattattcggccgggaatctggntnccntcccncttncttcataactgagngtngcaacagtgaaattggagctttgatcagaaaaaaaaaa

SEQ ID NO: 634 - DNA, 174 bp, Mus musculus
  misc_feature (1)...(174): n = A,T,C or G
agcttcctgctcattnntnctgccaccgcccactggtggaacctgnggagccacacactgtgcacctttctactggaccagagattattcgcgccgggaattggntnccntnccncttgcttcataactgagngtggaaacagtaaaattggagctttgatcagaaaaaaaaaa

SEQ ID NO: 635 - DNA, 189 bp, Mus musculus
  misc_feature (1)...(189): n = A,T,C or G
ttgctcatggggggagctnnctgctcatttgttctgccacgcccactggtggaanctgtngagccncacactgngcacactttactactggaccagagattatttcggccgggaattgnntnccctcccncttncttcataactgagtgtngcaacagtgaaattggagctttgatcagaaaaaaaaaa

SEQ ID NO: 636 - DNA, 284 bp, Mus musculus
  misc_feature (1)...(284): n = A,T,C or G
ttgctcagctggctttcttacagcatccaggaccagcagcccaggggtgacagagtgagctggtgccacagagagctgggccctcccacttcaatcatcaatcaagaatggagaacaggggctggagagatggctcagcggttaagagnnntgaccgctcttctgaaggtcctgagttcaaaccccagcaaccacatggnggctcacaccatctggncatgagatctgataccctcttntgggggtgtgtgaaacagctacagtgtacttacatataataagat

SEQ ID NO: 637 - DNA, 244 bp, Mus musculus
gactgagtgttttgcctgtgtgtatatatgtacacgtatgtacaccatgtcatgagcctccatggtcgtgagaggactttggatcccttggaactggcgttacattggtcgtgagcctccatgttggcgctgagaagcaaacctgggttctctggaagcgcagcaagtgctcttaaccatcgagccatctctccatctcaaaccacccatgtatataaaatgaaaatacataaaccaaaaaaaa

SEQ ID NO: 638 - DNA, 170 bp, Mus musculus
  misc_feature (1)...(170): n = A,T,C or G
tccgtgctactttgtnctggnacgcccactgntggaacctgnggagccacacactgtgcacctttctactggaccagagattattccggccgggaatcggnttccntcccccttncttcataactgagtgtngcancagtaaaattggagctttgatcagaaaaaaaaaa

SEQ ID NO: 639 - DNA, 162 bp, Mus musculus
actgaggtggggtctttcacagtgtcgaaaaagttttcctcggcggagcttccgccccaacctgctagtggtggcgcacgccggtaggatttgctgaaggaggcagaggcaggaggatcatgagttcgaggccagcctgggctacacatttaaaaaaaaaaa

SEQ ID NO: 640 - DNA, 261 bp, Mus musculus
  misc_feature (1)...(261): n = A,T,C or G
ccttggaggacctgctgcttattgncttgggggcanggnttgctcagcatggcctttcttacagcatccaggaccagcagcccaggggtgacagagtgagctggtgccacagagagctgggccctcccacttcaatcatcaatcaagaatggagaacagggncctggagagatggcctcagctggttaagagcggngnnngntcttctggaaggtcctgagttcaaaccccagcaaccacatggtggctcacacccatctg

SEQ ID NO: 641 - DNA, 219 bp, Mus musculus
  misc_feature (1)...(219): n = A,T,C or G
gactgaggtactggagagaggaatggctcagtgattaagaanattctctgctcttccagagggctggttcaattttcagcacccaaatggtggctttccatcacccgtggnttcagttccagatctgatgcattctggcctccttgggcatnaggcatgcgcattgcatacacatatacacacaggcaaaacacataataataaacattcacttctctc

SEQ ID NO: 642 - DNA, 315 bp, Mus musculus
  misc_feature (1)...(315): n = A,T,C or G
gactgagttcctctctttcagcccgagctgccatctcagttgaaccattcctctcnagctgctggttggcccgcaacaagtccagcctattgtgggtgatgccacccctgggttggtggccctggattctataanaaagctggctgagaaagccatgggaancaagccagtaagcagcacccctccatggcctctgtatcagctcatacctccaggttccagccccgattgaattcctgtcctgacttcctccaatgatggattatgatctggaaatcctagccaaataaacacttttctccccaaaaaaaaaaa

SEQ ID NO: 643 - DNA, 148 bp, Mus musculus
  misc_feature (1)...(148): n = A,T,C or G
cacgcccactggtggaacctgnggagccacacactgtgcacctttntantggaccagagattattncggccgggaattgggttccntnccccttgcttnataactganngtggcaacagtgaaattggagctttgatcaaaaaaaaaa

SEQ ID NO: 644 - DNA, 234 bp, Mus musculus
  misc_feature (1)...(234): n = A,T,C or G
gtcactgggggctgtgagatggctcagaagttaanagcgcttggcttttctagaagacagaggcttaattcccagcacccacaggggggtccaagctgtctgtaaccccagttccaaaggatccnacactctcttctgtaccaggcatatatgtgaatcccagacaaaatgccacattagataaacaaaactttatttaaataaataaatcatgccattcctcaaaaaaaaaaa

SEQ ID NO: 645 - DNA, 205 bp, Mus musculus
  misc_feature (1)...(205): n = A,T,C or G
ccagggtggttccactgttnacacctgggatggagnttgccgctcantcgttctgccacgcccactgctggagcctgccgctttcctgtnccaaaacnatcnnntngtcaccctgctactggattccaaaattatttggcntgaatcgggcccccttcccctgcttcataactgcatgcanaatantaaaattgagctttgatcg

SEQ ID NO: 646 - DNA, 282 bp, Mus musculus
  misc_feature (1)...(282): n = A,T,C or G
gggattcaaacgggagccgctttggactgactggctgccttcctcctcctccccctcctcccccttctgcttcagatttatttattatatgtaagtacactgtagcagttgtaggacacactagacgagggcaccagatctcattgtgggtggttgtgaaccacccaccatgtggttgctgggattngaactcaggatcttcagaagagcagncagggctctaaaccgctgagccatctntccagcctcctgcattccttcttaaggcatgaatgatcccag

SEQ ID NO: 647 - DNA, 278 bp, Mus musculus
  misc_feature (1)...(278): n = A,T,C or G
ctgtcctggaactcattgtataaaccnagctggcctcaaactcacagagattttcttgcctctgcctnctaagtgctgggattaaagatgtgtgtcannnatcctggacctgtnaattgntgatntttcctgcagggactggaccaccaaccaangaatacacatggagggancaggctgcanatgtgacagaggatgaccttgttgaacatctgatctaaagggaatgggagaagcaaagaataacatnctgtgatccctataatggcaaaaaaaaa

SEQ ID NO: 648 - DNA, 317 bp, Mus musculus
  misc_feature (1)...(317): n = A,T,C or G
gcctcccccagccctgaagcaggttgattcagacttgacctcgctgccgctgagcatgagaccacctggggtggagccttccgacctagccggctctattgttctgtcacctgctgctgctcgtctccaagacactgctacctgctgaaaggcccttgagataatctggagacagcatccagccgatcacctactggctggcgaagggcaccaagaatggattgtttggggggggcgggggaggaatggtgggatggggatgggcggcccctctttataagtacagactcttagtnnactttggggccttgaacaga

SEQ ID NO: 649 - DNA, 239 bp, Mus musculus; identical to SEQ ID NO: 231

SEQ ID NO: 650 - DNA, 332 bp, Mus musculus
gggctgctgaagcagtgatgactgaaagctgaagcagtgcactgtctgctctgtgaggagcagccccgcttggtcacagcatgttgtgaggagctatcaccaattgtagctggggtgtacgtggctgaggagccccatgatagaggagaccacagctaccctcatggcagctggcagcctctcaagaggagtgaaaacctggaggctggagagatggctcagtgggtaagagcactgactgcttttccagaggtcccaagttcaatacccagcaaccacatggtggctcacaaccactcgtaatgagatctgatgccctcttcttggtgtgt

SEQ ID NO: 651 - DNA, 347 bp, Mus musculus
  misc_feature (1)...(347): n = A,T,C or G
gaactgaggattgcgaccagaataagaagaanncttggctccgcagaaggtctttgcttttttcctgngaaacanaaatngncaacagaancangcctcncctctccatctgcaagaggagaaaggagaaaccacagcagtccccaaaggcagaaaggttccacggaaggcacatggggtaaagaagtgaatcctctctatcatttagcctagacaaaatggaggaccaaacacacacacacacacacacacacacgtgagatgccaggacttggaaggngtntctntanaaccttccgaaaggccatgaacangaaanaagggatttgtgctctgggagggacata

SEQ ID NO: 652 - DNA, 330 bp, Mus musculus
  misc_feature (1)...(330): n = A,T,C or G
gttgtgggctttaagaccctcattgtaactgctaggaagtcagnattctgctagcagccttcanatgaagatgtanaactctcanctcctcctgtnccatgcctgcctggatgctgccatgctcctgcttcgataataanggactgaacctctgaacctgtaagccagccccagttacatacaagttgtccttataagacttgccttggtcacggtgtcttgttcacagcagtaaaccctaactaaaacatagggtttgcttgttcgnttaaatcaatactttcgttctgaaagaccggcctatttntgggggatttatttggggtctaa

SEQ ID NO: 653 - DNA, 194 bp, Mus musculus
  misc_feature (1)...(194): n = A,T,C or G
ctcccctcccccagcctgaaacctgcttactcaagggtggagcttgccgctcaatccgttctgccacgcccactgntggancttgccgttttgctgtttcaaacccatcacgtgttcacctgnaaccttactcctaaattatttggcggnaatcggcccctcccccttccttcataacgggagtgctggaactt

SEQ ID NO: 654 - DNA, 141 bp, Mus musculus
  misc_feature (1)...(141): n = A,T,C or G
gttcctgttctggccaccctgagaaagngtgctgagaaccagaagaaaacaagagctgggtgtaacagcacttgggacgcagtgagttccaggctagcctgatctacatagagaaagcctaccaagagaagaaagaaaaaa

SEQ ID NO: 655 - DNA, 197 bp, Mus musculus
  misc_feature (1)...(197): n = A,T,C or G
tgctgagagactgaacctgtcttcctgagaaattcctgagatangcggacaacctgtggacttggcgacctaatgctaacagctctgacagactagtgctaacaacttagcaacaaagcatcaagaagcctggggtggcaggggatgggcctcccccctttntaaaagcanactnttagtaaactttgggccatgat

SEQ ID NO: 656 - DNA, 310 bp, Mus musculus
  misc_feature (1)...(310): n = A,T,C or G
actgagggtctcattttgttcctctggctgtcctggaactcattgtataaaccaagctggcctcaaactcacagagattttcttgcctctgcctcctaagtgctgggattaaagatgtgtgtcacccaccccccaccccccaatccctgagctctcccccagggactggaccaccaaccaaagaatacacatggagggaacaggctgcaaatgtgacagaggatgaccttgttgaacatctngatctaaagggaatgggagaagcaaagaaaaacatcctgtgatccctataatggcaaaaaaaaaccca

SEQ ID NO: 657 - DNA, 334 bp, Mus musculus
  misc_feature (1)...(334): n = A,T,C or G
tcaagaccacatcagggatttatttattgctatatgtaagtcacactgtggctgtcttcatacacaccagaagagggcatnagatctcattacagatggntgnganccnccatgaggtngctggnantggaactcagganctncataagagcantcggggctnttaaccactgaaccatttanccaggncctaattaatnttcttanttaatgattgacaacgganggtagtcagcccattatgggtggngccatccatgggctggaggtcctgagttctataanaaagcaaggtgagcangccagnnngaagcactcttgcatggcctctgca

SEQ ID NO: 658 - DNA, 319 bp, Mus musculus
  misc_feature (1)...(319): n = A,T,C or G
ctcccccagccctgaagcaggttgattcagacttgacctcgctgccgctgagcatgagaccacctggggtggagccttccgacctagccggctctattgttctgtcacctgctgctgctcgtctccaagacactgctacctgctgaaaggcccttgagataatctggagacagcatccagccgatcacctactggctggcgaagggcaccaagaatggattgtttggggggggcgggggaggaatggtgggatggggatgggcggcccctctttataagtncagactcttagtaaactttggggccttgaacagaaaaa

SEQ ID NO: 659 - DNA, 242 bp, Mus musculus
  misc_feature (1)...(242): n = A,T,C or G
gacattggctggccagcgagtccctggagtctgctgtcttcaccggctgtnaccactgggttacagntgtgtgcaactgngctcagnttttacatagatgcttgggctctacactgaggttctcaggcttgcatgaaagcactcatcacccactgagccatctccccagtcacagatcagtgattcgttaataaaaacttatgtagttttatatgtagaggaaatttattttcccagcatac

SEQ ID NO: 660 - DNA, 317 bp, Mus musculus; identical to SEQ ID NO: 590

SEQ ID NO: 661 - DNA, 430 bp, Mus musculus
  misc_feature (1)...(430): n = A,T,C or G
ctgaggtggggtctttcagtacnatgggatgatcttcttgatccgcnntgccactggaatggatcaacctgagcttanagtgctacngagggcaagagctggacttatgatgccacccctttggagggagcccaagatgtcaaagccatgggctatctactgaggaaagctgctaacagggagtggaaccagcccaggagaaagaagtttgttggactcaacaaagatgaaaaaggggttggagatgtggaaactgctttgacatcagacatggagatgtagaagtttggaggtttgcctggctggntttctgtcttgatttggggattttagttaagngattggatgaatctcnaaagaaacttttgccttttggacattgttgaagactgcttntanactatgggggacttttgaaagttggactaaa

SEQ ID NO: 662 - DNA, 268 bp, Mus musculus
  misc_feature (1)...(268): n = A,T,C or G
catgatgttcactaccntggaacctccgtttgangactcaattgcngatgtcngcangggatgctatngagccctgcctncctnanccntccgnctgaacgtggancgngnacatttttccaggtctcctgaaaagccngccntgacagntaagctgcttcgccttcnttnatattgaaaaatttgctttaagaaagctnactcctgggctggagaggnggctcanctgntaagagcnctgactgctcttccagaggtcctgagttca

SEQ ID NO: 663 - DNA, 278 bp, Mus musculus
  misc_feature (1)...(278): n = A,T,C or G
cccccttctcacactgatcctcccccaccctgaagcaggttgattcagacttgacctcgctgccgctgagcatgagaccacctggggtggagccttccgacctanccggctctattgttctgtcacctgctgctgctcgtctccaagacactgctacctgctgaaaggcccttgagataatctggagacagcatccagccgatcacctactggctggcgaagggcaccaagaatggattgnttggggggggcgggggaggaatggtcggtattttacc

SEQ ID NO: 664 - DNA, 374 bp, Mus musculus
  misc_feature (1)...(374): n = A,T,C or G
agccagcatagccatcatcaggagaggcttcacccaagcaattgatggaaagagatgcaganacccacngccaaacntgagacaaagcctggggaaagagggagaactatnanttgtaggaaccagaggggtcnaaaacaccanaaaaacctgcaaaatcaaccaacctgaccccataacagctcacggaaactgaaccaccaaccagggancctgcagggaaccgacctaggcctctgcncntaggtaacanttgtgcaccttgctcttgttaggtntgggactcctagcaaagggagcagaggctgtctctgactcctttggctgcctntcaattaaatacnttaataaaancttntttgaaattttcggga

SEQ ID NO: 665 - DNA, 386 bp, Mus musculus
  misc_feature (1)...(386): n = A,T,C or G
acagaaccgatgatcatatgaactcacagactgtggcagcactcctaagacatgtggaagttcaaaccagaccagggctcagcactgagatggggagcggacatgggatcccattactaaccaagaagttatctactattgacaccggttggcaaagggaaaaatccagtttctccagtgaagccttcccggctattatcaatcacactgcttggcaggcctcatgtacaggaatagctgaccaacacacaacaaacttagtatttctgtggatattttttcttttggcctttttttgtggggganaggncttatttggcatttacttgntnggttngatttccttctttgnattttttcattgnttcctctctctttcttcttct

SEQ ID NO: 666 - DNA, 257 bp, Mus musculus
gattgctgccaggctatgggtgtcccaggtactgacaggaccacaccattgctgtctttaagaaacttgctgggggctggcgagatggctcagtggttaagagcatcaactgcttttccgaaggtcccgagttcaaatcccagcaaccacatggtggctcacaaccacccgtaaagaaatctgatgccttcttctggaagatctgaggacagctacagtgtacttacatataataaataaatctttaaaaaaaaaaa

SEQ ID NO: 667 - DNA, 159 bp, Mus musculus
  misc_feature (1)...(159): n = A,T,C or G
agcactgcgtaaacttggtttcnaagcctatgaagcgacgacaggagggacagaagttcaaaggcatncttcaatacataatccaatccagcctggtctacagcgtgagttccaggacaaccagggctacacagagaaaccntgtctcaaaaaaccaaa

SEQ ID NO: 668 - DNA, 275 bp, Mus musculus
  misc_feature (1)...(275): n = A,T,C or G
taccttggctgccttgccttnaacattgtcacatcagctacacgtanttggtanaatggccnatcctgtttacaacaaagctacactantangangaacnacactatgcaactancnngtnccacccccacccnccacatctgtgttncntatctnccanaagatggcctngtcanccatcactgagagganaagccctcggtcttgcaaatatcatntgncccattacaggggaatgcctgggctangaaaccntgaatgggtttggtttggga

SEQ ID NO: 669 - DNA, 153 bp, Mus musculus
  misc_feature (1)...(153): n = A,T,C or G
ctgccacgcccactggtggaacctgnggagccacanactgtgcacctttntactggaccagagattattcggccgggaattggnttcnntncnncttgcttcataactganngtggcaacagtgaaattggagctttgatcagaaaaaaaaaa

SEQ ID NO: 670 - DNA, 276 bp, Mus musculus
  misc_feature (1)...(276): n = A,T,C or G
acactgtacctccctcntccctgaaagcaggctgatccanactttgaccttgctgcnaccgagaaggaaattacctaaggtggagctttccaacctaaatggctcttttgttctgccacctgccactgctctctccaagacactgctacccgctganaagcccctganatattccggaggagcatcctattctgcccatcgcctacaggctggttccaaacaccaataaatgggctggcggggggggggatgggcctnccccttttataattaaac

SEQ ID NO: 671 - DNA, 195 bp, Mus musculus
  misc_feature (1)...(195): n = A,T,C or G
agcatgagaccacctggggtgganccttccgacctagccggctctattgttctgtcacctgctgctgctcgtctccaanacactgctacctgctgaaaggcccttgagataatctggagacagcatccanccgatcacctactggctggcgaagggcaccaaaaatngattgtttggggggggcgggggaagaat

SEQ ID NO: 672 - DNA, 232 bp, Mus musculus
  misc_feature (1)...(232): n = A,T,C or G
gccctcgaagcaggttgattcanacttggacctcgctgccgctgagcatnanaccacctggggtggagccttccgacctacccggctctattgttctgtcacctgctgctgctcgtctccaaaacactgctacctgctgaaaggcccttgaaataatctggaaacagcatccagccgatcacctactggctggcgaagggcaccaaaaatggattgtttggggggggcgggg

SEQ ID NO: 673 - DNA, 175 bp, Mus musculus
gggttccagactgccctttgggattcaaacgggagccgctttggactgactggctgccttcctcctcctccccctcctcccccttctgcttcagatttatttattatatgtaagtacactgtagcagttgtaggacacactagacgagggcaccagatctcattgtgggtggttg

SEQ ID NO: 674 - DNA, 257 bp, Mus musculus
agatgctgccaggctatgggtgtcccaggtactgacaggaccacaccattgctgtctttaagaaacttgctgggggctggcgagatggctcagtggttaagagcatcaactgcttttccgaaggtcccgagttcaaatcccagcaaccacatggtggctcacaaccacccgtaaagaaatctgatgccttcttctggaagatctgaggacagctacagtgtacttacatataataaataaatctttaaaaaaaaaaa

SEQ ID NO: 675 - DNA, 315 bp, Mus musculus
  misc_feature (1)...(315): n = A,T,C or G
gcctcccccagccctgaagcaggttgattcagacttgacctcgctgccgctgagcatgagaccacctggggtggagccttccgacctagccggctctattgttctgtcacctgctgctgctcgtctccaagacactgctacctgctgaaaggcccttgagataatctggagacagcatccagccgatcacctactggctggcgaagggcaccaagaatggattgtttggggggggcggggnaggaatggtgggatggggatgggcggcccctctttataagtacagactcttantaaactttggggccttgaaca

SEQ ID NO: 676 - DNA, 219 bp, Mus musculus
  misc_feature (1)...(219): n = A,T,C or G
gaactgctgaggagaacagactatgcctgctgcctggaagagactcagacctgcctgaaggagagantctctgtcctgttgagctctccacaagtagtgnnatgaactccagggttcctgctcttggtgatgtagctatatttgagttgaccctgcccctgcccttgcccttttactnatattcttgtgaataactctaataaactcattggattacca

SEQ ID NO: 677 - DNA, 309 bp, Mus musculus
  misc_feature (1)...(309): n = A,T,C or G
tcccccagccctggaacaggttgattcagacttgacctcgctgccgctgagcatgagaccacctggggtggagccttccgacctagccggctctattgttctgtcacctgctgctgctcgtctccaagacactgctacctgctgaaaggcccttgagataatctggagacagcatccagccgatcacctactggctggcgaagggcaccaagaatggattgtttggggggggcgggggaagaatggtgggatggggatgggcggcccctctttataantacagactcttantaaactttggggccttga

SEQ ID NO: 678 - DNA, 330 bp, Mus musculus
aggtcacttgcccagatgttcacatttaggaagcctgtctccacatccctaggactatcccactgtcactgcctcagaagcctggtctccagagtcgactggtgtagtcccccctccctcagcctgaaacctgcttgctcaggggtggagcttcccgctcaatcgttctgccacgcccactgctggaatctgccgctttgctgttcggagccgtgcacgaggtcacccagctattggattccaagattaattggcgggaatcgggccccttcccctgcttcataactgcgtgcggaacagtaaaattgagctttgatcagaaaaaaaaaa

SEQ ID NO: 679 - DNA, 361 bp, Mus musculus
  misc_feature (1)...(361): n = A,T,C or G
gtgtgcgtctgcttcaagtgacatcaatctgccaatcngcccaagtccacagaagcggcaagaaactgcagaacaccaaaagttttttggtgtgtttctatggagttctgacaaattcagctcaactgggcaatgtaaggtggaccaacatatgcgtgtcactagcaaagcattctttatcacgtgtcctttcacgttcttgctttagaagaacatccttttcctttatgtctgcttcaggaaatattccttcccaagttcgccttagcctttcacctgtgtccacttcaggaaaacactctttcacgtgtttgtcccancaaaacaccatccaatacaaccgactttccaaagaaaaaaa

SEQ ID NO: 680 - DNA, 376 bp, Mus musculus
  misc_feature (1)...(376): n = A,T,C or G
agagagaggggcatcaacccacccacaaaaccttcaacccaaaatgtgttctgcctacaagatacacanggataaagatggagcagagattgaggggacggccaaccagngactgnctaactcgagacccatcccatgggagagagccaacccctgccactattgacactcggctatgcttgnagacagtgtgactccttgacaacagtgtgcctcgttatggttttatgaaaccagttaacagtcttcctccaaggtctctgcttcagtccctgcctccaggaaatgccctgcttgtgtttctgctctgacttcccccagtgatggaatgttaccatggaagataaaataaatctttcccacatcaaaaaaaaaa

SEQ ID NO: 681 - DNA, 305 bp, Mus musculus
ctctctttcagcccgagctgccatctcagttgaaccattcctctcgagctgctggttggcccgcaacaagtccagcctattgtgggtgatgccacccctgggttggtggccctggattctataagaaagctggctgagaaagccatgggaagcaagccagtaagcagcacccctccatggcctctgtatcagctcatacctccaggttccagccccgattgaattcctgtcctgacttcctccaatgatggattatgatctggaaatcctagccaaataaacacttttctccccaaaaaaaaaaa

SEQ ID NO: 682 - DNA, 291 bp, Mus musculus
ctcccccagccctgaagcaggttgattcagacttgacctcgctgccgctgagcatgagaccacctggggtggagccttccgacctagccggctctattgttctgtcacctgctgctgctcgtctccaagacactgctacctgctgaaaggcccttgagataatctggagacagcatccagccgatcacctactggctggcgaagggcaccaagaatggattgtttggggggggcgggggaggaatggtgggatggggatgggcggcccctctttataagtacagactctta

SEQ ID NO: 683 - DNA, 234 bp, Mus musculus
  misc_feature (1)...(234): n = A,T,C or G
accacctgggatggagccttcccacttagatggctctatnganctgtcacgtgctgctgntctccangacactgntacctgctganaggccctggagatattccggagacagcatcccgcagatcacctactggcaggcaacaggcatcaacaatggattggcggggggatgggcctcccccctttataagcacagactcttagtaaacttgggggccttgaacataaaaaaaa

SEQ ID NO: 684 - DNA, 450 bp, Mus musculus
  misc_feature (1)...(450): n = A,T,C or G
ggcttacaggtggtgcagaaagaagtctggtcacaactggctacagtgaacgagctgggtaccccaaggacatcttaccagttccagccaaagatctgatctacgtacacctgcgtcatgctgagaccctcaagcctcactaaaagggtccctgcctagttctgtttactaatctgccttattctgttgttgttcccatgttaaagatagagtaaatgcagtattctccacatagagatatagacttctgaaattctaagattagaattacttacaagaagaagtggggaatgaagaatgaaaaattactggcctcttgtgagaacatgaactttcacctcggagcccaccccctnccatctggaaaacatactttgagaaaaaacctttttctgggaacacccacagaatgttcaacagggccagatgtattgccaaacacaggatatg

SEQ ID NO: 685 - DNA, 412 bp, Mus musculus
  misc_feature (1)...(412): n = A,T,C or G
cggaacctggaatcaggagctgatgcagaggccacggaagattgctgcttaccggattgttcatcatggcttgctcagcctgctgtcttatagaccatgctttctttcacacatttgttttactgtttttcttcctgaaaatacattcatgtggctgctgagctggagtcagggaaggtccagatgggctgtgaggcatagggtgctgctgatcatatggatcaaatctatctcatcacttttcttttaatctctggttttactttctaaaacagcaggctttagttttaaatttaatatgccaaggctctgtgttttctccccttagttcttttttttttctgtaattttagggctcatttggatatgatccangatttaaaataangancatttatgggaaaaaaaaaaa

SEQ ID NO: 686 - DNA, 248 bp, Mus musculus; identical to SEQ ID NO: 177

SEQ ID NO: 687 - DNA, 219 bp, Mus musculus
gattcagacttgacctcgctgccgctgagcatgagacccctggggtggagccttccgacctagccggctctattgttctgtcacctgctgctgctcgtctccaagacactgctacctgctgaaaggcccttgagataatctggagacagcatccagccgatcacctactggctggcgaagggcaccaagaatggattgtttggggggggcgggggagga

SEQ ID NO: 688 - DNA, 414 bp, Mus musculus; identical to SEQ ID NO: 196

SEQ ID NO: 689 - DNA, 242 bp, Mus musculus
  misc_feature (1)...(242): n = A,T,C or G
tataaacagtaagaactgctgaggagaacangactatgcctgctgcctggaagagactcangacctgcctgaaggagagattctctgtcctgttgagctctccacaagtagtgtaatgaactccagggttcctgctcttggtgatgtagctatatttgagttgaccctgcccctgcccttgcccttttacttatattcttgtgaataactctaataaactcattggattaccaaaaaaaaaa

SEQ ID NO: 690 - DNA, 247 bp, Mus musculus
  misc_feature (1)...(247): n = A,T,C or G
cctgaagcaggttgattcanacttgacctcgctgccgtcngatgcctganactcacctggggtggagccttccgacctagccggctctattgttctgtcacctgctgctgctcgtctccaagacactgctacctgctgaaaggcccttgagataatctggagacagcatccagccgatcacctactggctggcgaagggcaccaagaatggattgtttggggggggcggnggaggagtggaggtttg

SEQ ID NO: 691 - DNA, 252 bp, Mus musculus
  misc_feature (1)...(252): n = A,T,C or G
agcctcccccagccctgaagcaggntgattcagacttgacctcgctgccgctgagcatgagaccacctggggtggagccttccgacctagccggctctattgttctgtcacctgctgctgctcgtctccaagacactgctacctgctgaaaggcccttgagataatctggagacagcatccagccgatcacctactggctggcgaagggcaccaagaatggattgtttggggggggcgggggaggaatggtg

SEQ ID NO: 692 - DNA, 327 bp, Mus musculus
  misc_feature (1)...(327): n = A,T,C or G
tgaaggaccatcctgggagngccccaantaaggatgtatcctgtntactacactcctggcactgtggccattgtatgangcattngctgtcggnaacctggtatgactgctccttgggagattcagccngcaactgananatatanatgtggatgctngganccaaccatcatactgagctcagggaccctggngggggagctggcataaggactganggagctgagggggatagcaaccccataggaagaatancatcagctggacngaccacncagtgcttncagggactagaccaccaaccnaggagtgtaccgggagggatcc

SEQ ID NO: 693 - DNA, 275 bp, Mus musculus
  misc_feature (1)...(275): n = A,T,C or G
aggctggctctattgtcacanaaatntgcctgtnctgcctcctgagnctgaaaccacaacacaacttctttatgtagcctcagatgtcctggaacttgctccatagaccaggctggcctcaaactcagagatctgtctgcctctgcctcctgagcgctgggactaaaggtgtacgacaccagcatctggccaagggtttttgtttgttagttttttaatactcaattaattattgntcacaagtcaacattcgcaacacttcatggaaaacttag

SEQ ID NO: 694 - DNA, 580 bp, Mus musculus
  misc_feature (1)...(580): n = A,T,C or G
gagcgcgctgtcttcatgtacaccagaagatctactgccagaagagggcatcagatccctgtatagctggtcctgagccatcatgtggctgctgggattgaacttagaacctttggaagaacagttagtgtttttagctgcttagtcctaaggagaaacattttaaagagagacacttgtagctaccctttgaacatcagtctgttgagataatggactgcaaaagaaaaattccccagcaatcccagcgtgagagaagggacaggatgcagcctggtgccagagagcagaggaacttgcacacagttctaacagctcattggccaccctatagcccagattggtgttgagatgatagcgtctgttttactggtcccgcttgtctctctagggaaacagcagaccattagagcaagacataactaagtaggtgtatatgacacaaagtgntttcttttggttttggtttttgagacaagggttctctgngnaaccctggctgncctagaactcacatgtanagcccctggactggagttggctacaaaatgncttaagtgcttgctgagtctgacttata

SEQ ID NO: 695 - DNA, 188 bp, Mus musculus
  misc_feature (1)...(188): n = A,T,C or G
agaatagaaggacaaggtggaggagaaggccggccgntaagaacggaagaanagaagtatctggacggaggaggagaatggagctgaggaagaggaagaagaaactgcagaggatggagaggatgatgatgaaggggatgaagaagatgaggaagaagaggaggaggatgaaggccccgtgcggaaga

SEQ ID NO: 696 - DNA, 134 bp, Mus musculus
tcctgttctggccccctgagaaagtgtgctgagaaccagaagaaaacaagagctgggtgtaacagcacttgggacgcagtgagttccaggctagcctgatctacatagagaaagcctaccacgagaagaaagaa

SEQ ID NO: 697 - DNA, 202 bp, Mus musculus
  misc_feature (1)...(202): n = A,T,C or G
gactgaggtctcagaagtcagaagaggtcatgtcatgctcccctggtggagctggagctacnagcaactgtgaaaactactctgcatatnactcttcaaaagcagtaacaagtgatcttccacccctctgcctctcctctgcaagaacagcaagtgctcttaacctgttaatcatggagcattttcactagcaaaaaaaaaa

SEQ ID NO: 698 - DNA, 157 bp, Mus musculus
  misc_feature (1)...(157): n = A,T,C or G
tcccctggtggagctggagctacnagcaactgtgaaaactactctgcatattactcttcaaaagcagtaacaagtgatcttccacccctctgcctctcctctgcaagaacagcaagtgctcttaacctgttaatcatggagcattttcactagcatt

SEQ ID NO: 699 - DNA, 155 bp, Mus musculus
  misc_feature (1)...(155): n = A,T,C or G
ttgaagccctgaggtttccangatgcctttccngactagaacccagacatgtgagccgctggctggacacaacagctcacaaccatctgtacaacttcaatgtactcatatacataaaataaataaataaacctctaaaaaaaggttacaataaa

SEQ ID NO: 700 - DNA, 246 bp, Mus musculus
agaactgaggttatataaacagtaagaactgctgaggagaacagactagcctgctgcctggaagagactcagacctgcctgaaggagagattctctgtcctgttgagctctccacaagtagtgtaatgaactccagggttcctgctcttggtgatgtagctatatttgagttgaccctgcccctgcccttgcccttttacttatattcttgtgaataactctaataaactcattggattaccaaaa

SEQ ID NO: 701 - DNA, 208 bp, Mus musculus
  misc_feature (1)...(208): n = A,T,C or G
ctgaaacctgcttactcaggggggggagcttgccgntnaatcgttctgccacgcccactgctggagcttgccgctttgctgtttcgaagccatcacgtgttcacctgcaaccttactcctagattatttggcggggaatcggccctcccccttcttcataacggagtgctggaatagtaaaaattgaaccttgagcagaaaaaaaaaa

SEQ ID NO: 702 - DNA, 146 bp, Mus musculus
  misc_feature (1)...(146): n = A,T,C or G
agaagtgaaggcatgaagatcaagaaatgcagctatccttgactttgtcaggaccangcctgagctaaaagagcaagaccctgcatcaaccagaaaacaaggtccaaagaaaccaaccaaccaacaaacaaacaaacaaacaaaaa

SEQ ID NO: 703 - DNA, 370 bp, Mus musculus
  misc_feature (1)...(370): n = A,T,C or G
actgaggtttttcttcccgtgaanagacaagaggactactgnagctcttataaanaaaagcatttaatnngggctggcttacaattcagagctttaatccattattgtcatggtaggaaacatggcancacacaagcagacatggngctggagataaatagccaaaagttctttctacatctccgtctgcaggcagcaggaagtttgaaagacagngggtctggcttgagcatttgcaacctcaaagaccccaccccacccctgtgacacacttccttcaacaagccacacctaatagccattcccaggngactaagcatttaaatctctgagccacagnataacttcaataaattccttgaaattgggg

SEQ ID NO: 704 - DNA, 235 bp, Mus musculus
  misc_feature (1)...(235): n = A,T,C or G
gtggatccgagctaccactgctgcctcctatgaactgaactgatgatttcctgacaaagcagatgggatttactccaaagaacaactgctaaacaggtccacttccctggtatcctaataacctttcttttctactcnctntgnagnatgangggctaaaaggatgggtaaancatttaaaaacctattnaaagagccgggngtggcggccnannccntttatcccaaggggtaa

SEQ ID NO: 705 - DNA, 201 bp, Mus musculus
cactgagacaggtgaagcaagaagtttgacccccttacccaagagtgaaaggtcacagaagatgagagaacagagagctggaaggctggattgatgacactgactgctcatccggaagatctgggttccgttcctagcacatgcatgcatgcatacatacatacatacatacatacatacaaccaattgtaaaaaaaaaaa

SEQ ID NO: 706 - DNA, 183 bp, Mus musculus
  misc_feature (1)...(183): n = A,T,C or G
acagcatccagccgatcacctactggctggcgaagggcaccaanaatggattgtttngggggggcgggggaggaatggngtgatgggggnncacncctccnagtagtaccactccctgggccaagcatattcaaaccaccacgtcatcctatagaaactcctatacttcctacaaagggcaaa

SEQ ID NO: 707 - DNA, 294 bp, Mus musculus
  misc_feature (1)...(294): n = A,T,C or G
gccgaccagcagctcccgaggaacggtacaactgagatggcngctcgaggtgaaagagaggaactngacagacggaaganagaacggagccangtcaaagtggactctgatcaaagctcaattttactattccaacacgcagttntganggaggggangggggggccgattcccgccaaataatcctggagtccagtancanggtgaccacgtgtntggctccagaacagcnnngcngcnggnnccagcagtgggcgtggcnnancgattgaggggcaagctccatccagatgt

SEQ ID NO: 708 - DNA, 306 bp, Mus musculus
  misc_feature (1)...(306): n = A,T,C or G
taagtctcgaaattcgatatcaagctgatcccggaacccttaatataacttcgtataatggnatgctatacgaagntatnangtaccntnganntgcangactaggattaaatgcccggttaangaagatactccagggctggagagatggctcangggttcagatcacagactgctcgtccagaggtcctgagttcaattcccagcaaccacaaggtggctcacaacacctcttctggtgtgtctaaagacagcaacagtgtattcatgtacattaaatgaataaataaattgtaaaaaaaaaaa

SEQ ID NO: 709 - DNA, 455 bp, Mus musculus
  misc_feature (1)...(455): n = A,T,C or G
agacagaagtggaagaagcctttggagagagccagaanccgacngaggncggaagagtcgaancggntatncctggttgncaactngacaatatttggaatgaactacaatccggaatctggaaggctcaccagttgacccttatctggaggcttggaganccttatctaggatnttggntngaanatcntganccatattgnctatggntnccagaanantgaatntncgagtttaaggaacacacctttaatctgggctacgcctttcatctggnattaaaggtgnggnggnacacacctttnntctgggctacaccttctgntggngacaatataaggacattggaanaagggngncnagctnttgctnctgctccttcgnctgcttgctgngngagactgagtaactgctagatccttggacttccattcacagctgtgactgaacgattg

SEQ ID NO: 710 - DNA, 339 bp, Mus musculus
  misc_feature (1)...(339): n = A,T,C or G
aaacgggagccgatttggactgactggctgccttcctcctcctccccctnctcccccttctgcttcagatttatttattatatgtaagtacactgtagcagttgtaggacacactagacgagggcaccagatctcattgtgggtggttgtgaaccacccaccatgtggttgctgggatttgaactcaggatcttcagaagagcagtcagggctctaaaccgntgagccatctntgcagcgctgctgcattccttcttaaggcntgaatgatgccaggataggaagacaggctgcccctccctncttttcgagccattgttncctttcaccatatactca

SEQ ID NO: 711 - DNA, 317 bp, Mus musculus
  misc_feature (1)...(317): n = A,T,C or G
ttgccaagcccttgaaagcaagttgattcngacttgacctcgctgccgctgaagcatgaaaaccacctggggtggagccttccgacctaaccggctctattgttctgtcacctgctgctgctcatctccaanacactgctacctgctgaaaggcccttggagataatctggagacagcatccagccnatcacctactggctggcgaagggcaccaanaatggattgtttggggggggcgggggaagaatggtgggatggggatgggcggcccctctttataantacagactcttagtaaactttggggccttgaacg

SEQ ID NO: 712 - DNA, 218 bp, Mus musculus
  misc_feature (1)...(218): n = A,T,C or G
attatattatacataaaaacactgtagctgtcttcanatgcacanaanagggcgtcagatctcattacggatggttgtgagtcaccatgtggttgctcggatttgaactcaggaccttcggaanaacagtccgtgctcttaccctctganccatctcaccagccctgatctccattgtatgtgcatgcacatgtaaataaacataataaaacatcgta

SEQ ID NO: 713 - DNA, 232 bp, Mus musculus
  misc_feature (1)...(232): n = A,T,C or G
gaacaggttgattcagacttaacctcgctgccgctgagcatgagaccacctggggtggagccttccgacctagccggctctattgttctgtcacctgctgctgctcgtctccaanacactgctacctgctgaaaggcccttgagataatctggagacagcatccagccnatcacctactggctggcgaagggcaccaaaaatggattgtttggggggggcgggggaagaatt

SEQ ID NO: 714 - DNA, 136 bp, Mus musculus
  misc_feature (1)...(136): n = A,T,C or G
caacaatgccctttgggatcaaacgggagccgctttggactgactggctgccttcctcctcctccccctcctcccccttctgcttcaaatttatttattatatgtaagtacactgtancagttgtaggacacacta

SEQ ID NO: 715 - DNA, 421 bp, Mus musculus
  misc_feature (1)...(421): n = A,T,C or G
gtgactggatgaactgagaaaagattgaatttggacttttagcattgttgaaactgctgtggaccatggggagtnaanaaattgaactaaatgtatttctcattatgctatggctagggatggcccccacaaactcatntntttgaacaaacctatgggggccagtgantacaatgtggtggtttgaatatgcttggcccagggantggcactgtntgaccctnttggacaaattntntcnctgttggggtgggcaaaaaaanctnccncctacctncctggggatnccantctcttctggttgccttcaaatcaaaatgcaaaactctcagctccttctccaacattatttctgcctgggacactgccatgctttgctncctgctgtnatnatnatggactggaacctctgaaactgtaa

SEQ ID NO: 716 - DNA, 249 bp, Mus musculus
  misc_feature (1)...(249): n = A,T,C or G
gaaccaggttgattcanacttggacctcgctgccgctgancatgaaaccacctggggtgganccttccgacctagccggctctattgttctgtcacctgctgctgctcgtctccaaaacactgctacctgctgaaaggcccttgaaataatctggaaacagcatccanccnatcacctactggctggcnaagggcaccaaaaatggattgtttggggggggcgggggaaagaatggtgggatgggggat

SEQ ID NO: 717 - DNA, 330 bp, Mus musculus
  misc_feature (1)...(330): n = A,T,C or G
gaagcaggttgattcaaacttgacctcgctgccgctgagcatgaaaccacctggggtggagccttccnacctanccggctctattgttctgtcacctgctgctgctcgtctccaaaacnctgctacctgctgaaaggcccttgaaataatctggaaacagcatccagccaatcacctactggctggcaaagggcaccaaaaatggattntttggggggggcgggggaanantgntgggatgggnatggggangggactcttngtanntccagaannntngggtggangtggnggggnnngnggangcgaaggggagaagagagaagggag

SEQ ID NO: 718 - DNA, 266 bp, Mus musculus
  misc_feature (1)...(266): n = A,T,C or G
agggtgccaagactgccctttgggattcatanggganccgcnttggactgactggctgccttcctcctcctccccctcctcccccttctgcttcanatttatttattatatgtaagtacactgtagcagttgtaggacacactaggacnagggcaccaaatctcattgtgggtggttgtgaaccacccaccatgtggttgctgggatttnanctcggngatcttcagaanagcattcngggctctnaaccggtgagccttctctcc

SEQ ID NO: 719 - DNA, 283 bp, Mus musculus
  misc_feature (1)...(283): n = A,T,C or G
gaagccttggactggacttgcaactcgatggatancccanggtggcacnnaacttcncatccttctaattcccaagtgttaaaatttcaggtatgggctggtgacatggctcagtgggtaaaaacgcccgactgctcttccgaaggtctgaanttcaaatcccagcaaccacntggtggctcacaaccatctgtaacaaaatctgacgccctcttctggantgtctgaagacagctacagtgtacttacatataataaataaataaatctttaaaaaaaaaaa

SEQ ID NO: 720 - DNA, 322 bp, Mus musculus
  misc_feature (1)...(322): n = A,T,C or G
actgccctttgggattcaaacgggagccgctttggactgactggatgccttcctcntcctccccctcctcccccttctgcttcagatttatntattatatgtaagtacnctgtnncagttgtaggacacnctanacgagggcaccnaatctcattgtgggtggttgtaatccnccccccatntggttgctgggatttgaactcaggatcttcagaagagcagtcagggctctganccgctgnagccatctctccagcctcctgcattccttcttanggcatgaatgatcccagcgtaggaagacnttctgccctccctcctt

SEQ ID NO: 721 - DNA, 735 bp, Mus musculus
  misc_feature (1)...(735): n = A,T,C or G
gtcattagcaagaaaacganaacaantgcngtttcttgtggcaagccatgttcaagttccagtcataccgaactgtgcagggagataatgaagctcttcgtacctctgatatttcttcacagaatgccatacaacctggctttgtacctccacctgcanaaggtagtcnagcctatcttganccttcagcagcaggagcagcangagcagcagcagcagcagcagcagcagcagcaccantggncacaccagtggcagcaccactaccactgccgcctccacttcctcctcctcctcctgctactcttgaagcangagatgcttcggggtttcctcttccaccaccaccaccaccancgccgccgccgccgccgccttattcctatgatccnagtggaantgatctgccccaagatacaaaagttttanagtactatttccatctggggattgcngtgctatcancacaactactggcctcccatngtttatatgccacatgtgcagcangcagctgcagccngcancccgcatgccggcagccccagncggcagnccgcaancaaaanccccagccccaanccgcaaccacaacaaccgcaacangcagcagccgccgcngcacaacagcaacaacaacaagaacaggttcatggaaaanattttccanaattgttctggaaccancccccctnnaacaaantctccccggntttcattaatttgttaaaaaaa

SEQ ID NO: 722 - DNA, 387 bp, Mus musculus
  misc_feature (1)...(387): n = A,T,C or G
cgacgagattcctgtgaanagagaggggcatcagtcccanccacaanaccttcancccanaatgtgttctgnctaccacatacngaaggattnnnatcgaccaaacatngaggggacggcgnaccagtgactgnnctcactcgagacccatcccatgggaaagagccaacccctgccacnattgacactcgnctatgcttgcangacagtgtgactccttgacaacagtgtgcctcgttatggttttatgaaaccagttnacagtcttcctccaaggtctctgcttcagtccctgcctccaggaaatgccctgcttgtgtttctgctctgacttcccccagtgatggaatgttaccatggnaagataaaataaatctttcccacatc

SEQ ID NO: 723 - DNA, 318 bp, Mus musculus; identical to SEQ ID NO: 181

SEQ ID NO: 724 - DNA, 316 bp, Mus musculus
gcctccccagccctgaagcaggttgattcagacttgacctcgctgccgctgagcatgagaccacctggggtggagccttccgacctagccggctctattgttctgtcacctgctgctgctcgtctccaagacactgctacctgctgaaaggcccttgagataatctggagacagcatccagccgatcacctactggctggcgaagggcaccaagaatggattgtttggggggggcgggggaggaatggtgggatggggatgggcggcccctctttataagtacagactcttagtaaactttggggccttgaacaga

SEQ ID NO: 725 - DNA, 130 bp, Mus musculus
  misc_feature (1)...(130): n = A,T,C or G
agctcaatgtctggctgcagcacctgtggatgtcctgctgctatgaagccnaaacttaaaaatggaaaccnatgtgtgcagactgctggagagagagagagagagagagagagagagagagaaaaaaaaa

SEQ ID NO: 726 - DNA, 288 bp, Mus musculus
  misc_feature (1)...(288): n = A,T,C or G
ggacttgacctcgctgccgctgagcatgagaccacctggggtggagccttccgacctagccggctctattgntctgtcacctgctgctgctcgtctccaagacactgctacctgctgaaaggcccttgagataatctggagacagcatccagccgatcacctactggctggcgaagggcaccaagaatggattgtttggggggggcgggggaggaatggtgggatggggatgggcggcccctctttataagtacagactcttagtaaactttggggccttgaacagaa

SEQ ID NO: 727 - DNA, 135 bp, Mus musculus
  misc_feature (1)...(135): n = A,T,C or G
aggagacgaggttagtctgtgtggccctggctgtcctggaactcactctgtagacaaggntggnccactaactcagnagatctacctgnctntgcctcctgagattaaaagtgtgtgccaccaccaaaaaaaaaa

SEQ ID NO: 728 - DNA, 176 bp, Mus musculus
ttaagggttccagactgccctttgggattcaaacgggagccgctttggactgactggctgccttcctcctcctccccctcctcccccttctgcttcagatttatttattatatgtaagtacactgtagcagttgtaggacacactagacgagggcaccagatctcattgtgggtgg

SEQ ID NO: 729 - DNA, 271 bp, Mus musculus
  misc_feature (1)...(271): n = A,T,C or G
atgaagcctggactgncctngaactcctggatacccaaggatggcactgaacttctcatccttctaantcccangtgntaananttcaggtatggnctggtgagatggctcanatgggtaagagcgcccgacgtgctcttccgaaggtctgaagntcagntnccagnnaccacatggtggctcacaaccatctgtancaagatctgacgccctcttctgnantgtctgaggacngctacanncgtncttacatntaatcacacaatttaaa

SEQ ID NO: 730 - DNA, 361 bp, Mus musculus
  misc_feature (1)...(361): n = A,T,C or G
cccacccacaaaaccttcaacccaaaatgtgttctgcctacaagatacacagggataaagatggagcaggagattgaggggacggtcaancagngactgnctaactcgagacccatcccatgggagagagccaacccctgccactattgacactcggctatgcttgcagacagtgtgactccttgacaacagtgtgcctcgttatggttttatgaaaccagttaacagtcttcctccaaggtctctgcttcagtccctgcctccaggaaatgccctgcttgtgtttctgctctgacttcccccagtgatggaatgntaccatgggagataaantaaatcttttcccacatcaaaaaaaaaa

SEQ ID NO: 731 - DNA, 284 bp, Mus musculus
  misc_feature (1)...(284): n = A,T,C or G
gattaggaagcctggactgccttgaactnctggatacccaggatggcactgaacttctcatccttctaattcccaagtgttaagatttcaggtatgggctggtgagatggctcagtgggtaagagcgcccgactgctcttccgaaggtctgaagttcaaatcccagcaaccacatggtggctcacaaccatctgtaacaagatctgacgccctcttctggagtgtctgaagacagctacagtgtacttacatataataaataaataaatctttaaaaaaaaaaa

SEQ ID NO: 732 - DNA, 365 bp, Mus musculus
  misc_feature (1)...(365): n = A,T,C or G
tcacaacgaccaccangaacagcagccgcagtggaggagcggggagccagagcctanaagacaaagctgcgtgtgctgcagagggcggagccagaaaagtgacccaaacccttcggaggagcccgaagaccttgagttgattcagactttggatgccgagttatttgattattgttggggtttgtttttgctttgattcgattgtgacactgccctggttcttctctcttggagtaagaaagtatttaatgtatttttttattttacaagancccacanntnaaanactgaatttttgaagaaattttaggacctcaaagacgctttgcggttaaaaagactgaattttaaactgtttgaacttg

SEQ ID NO: 733 - DNA, 191 bp, Mus musculus
gggttccagactgccctttgggattcaaacgggagccgctttggactgactggctgccttcctcctcctccccctcctcccccttctgcttcagatttatttattatatgtaagtacactgtagcagttgtaggacacactagacgagggcaccagatctcattgtgggtggttgtgaaccacccaccatg

SEQ ID NO: 734 - DNA, 140 bp, Mus musculus
agctcagcatggaagctcccagctaccgctccagtgcgatgcctgtctgcccactgtcatgctccacgccacgatggccatggactctaatgctctgtgactgtgaaccccaataaactcgttcttttataaaaaaaaaa

SEQ ID NO: 735 - DNA, 395 bp, Mus musculus
gaactggtccctactgtaaccagacaggacttcctgtgaagagagaggggcatcaacccacccacaaaaccttcaacccaaaatgtgttctgcctacaagatacacagggataaagatggagcagagattgaggggacggccaaccagtgactgcctaactcgagacccatcccatgggagagagccaacccctgccactattgacactcggctatgcttgcagacagtgtgactccttgacaacagtgtgcctcgttatggttttatgaaaccagttaacagtcttcctccaaggtctctgcttcagtccctgcctccaggaaatgccctgcttgtgtttctgctctgacttcccccagtgatggaatgttaccatggaagataaaataaatct

SEQ ID NO: 736 - DNA, 392 bp, Mus musculus
  misc_feature (1)...(392): n = A,T,C or G
ccagaaaccagctatccaacaatccaccaacccagccatccagccatccaccaacccagccatccagccatccagnaaaccagccatccagccatccagccatccaccaacccagccatccagccatccagcaacccagccatccagccatccagcaacccagccatccagccatccagcaatagcaaaagcagcaaatgcagcagcagggaccaacagcagggggagcagtagcccccgcccaggctctctgggagctcttgaatttataccctctcaagagtccccagaattccaaatgcaaactatctgcaggtggcaaaaatcatagntagcagccctgtatcccacacctgagattaaagcanaaacataatcacataagatgaaaa

SEQ ID NO: 737 - DNA, 246 bp, Mus musculus
ggccttgtttggaagagatgatcaataactacaatgagctaagcagaagtttaagatcaatgtactggggctggtgagatagctcagtgggtaagagcacccgactgctcttgctaaggtccggagttcaaatcccagcaagcacatggtggctcacaaccatccgtaacaagatctgactccctcttctggagtgtctgaagacagctacagcgtacttacatataataaataaataaataaaaa

SEQ ID NO: 738 - DNA, 168 bp, Mus musculus
cagactgccctttgggattaaacgggagccgctttggactgactggctgccttcctcctcctccccctcctcccccttctgcttcagatttatttattatatgtaagtacactgtagcagttgtaggacacactagacgagggcaccagatctcattgtgggtggttg

SEQ ID NO: 739 - DNA, 250 bp, Mus musculus
gcctcccccagccctgaagcaggttgattcagacttgacctcgctgccgctgagcatgagaccacctggggtggagccttccgacctagccggctctattgttctgtcacctgctgctgctcgtctccaagacactgctacctgctgaaaggcccttgagataatctggagacagcatccagccgatcacctactggctggcgaagggcaccaagaatggattgtttggggggggcgggggaaggaatgg

SEQ ID NO: 740 - DNA, 400 bp, Mus musculus
gtaacccgacaggacttcctgtgaagagagaggggcatcaacccacccacaaaaccttcaacccaaaatgtgttctgcctacaagatacacagggataaagatggagcagagattgaggggacggccaaccagtgactgcctaactcgagacccatcccatgggagagagccaacccctgccactattgacactcggctatgcttgcagacagtgtgactccttgacaacagtgtgcctcgttatggttttatgaaaccagttaacagtcttcctccaaggtctctgcttcagtccctgcctccaggaaatgccctgcttgtgtttctgctctgacttcccccagtgatggaatgttaccatggaagataaaataaatctttcccacatcaaaaaaaaaa

SEQ ID NO: 741 - DNA, 322 bp, Mus musculus
  misc_feature (1)...(322): n = A,T,C or G
agcagatgggaaaagataatacacatgaggtaaggactggaaccaatgaaancagaaatgaagagaagaanatatacaaagaatcaaacaaaattggttctttgaaaagattaacaagattgacaagtctttagctgaaaccttcccccaatatgaagcaggctgagccagaccttgactttgctgccactaagaagatcacctagggtggagcctgcctccctagatcactctattgttcagccactgtcgctgctacctgctgggagtctgcctagctattccggagactacaccctatcctgcaaggtgatcacctgca

SEQ ID NO: 742 - DNA, 254 bp, Mus musculus
gccctgaagcaggttgattcagacttgacctcgctgccgctgagcatgagaccacctggggtggagccttccgacctagccggctctattgttctgtcacctgctgctgctcgtctccaagacactgctacctgctgaaaggcccttgagataatctggagacagcatccagccgatcacctactggctggcgaagggcaccaagaatggattgttttggggggggcgggggaggaatggtgggatggggatgg

SEQ ID NO: 743 - DNA, 254 bp, Mus musculus
gaagcctcccccagccctgaagcaggttgattcagacttgacctcgctgccgctgagcatgagaccacctggggtggagccttccgacctagccggctctattgttctgtcacctgctgctgctcgtctccaagacactgctacctgctgaaaggcccttgagataatctggagacagcatccagccgatcacctactggctggcgaagggcaccaagaatggattgtttggggggggcgggggaggaatggtg

SEQ ID NO: 744 - DNA, 188 bp, Mus musculus
gtctcagaagtcacgaagaggtcacgtcagctcccctggtggagctggagctacaagcaactgtgaaaactactctgcatattactcttcaaaagcagtaacaagtgatcttccacccctctgcctctcctctgcaagaacagcaagtgctcttaacctgttaatcatggagcattttcactagcaaa

SEQ ID NO: 745 - DNA, 400 bp, Mus musculus
gctacctgcattaagtcacgaactgagggtcctcatgtagcccacactagattcaaactcgctgtgtactaagtaagtctggccttgaaccctcctgtccacacctccagttgggatctaaggtatgtgtcaccatgcccagttatttgtttgcttgtttgtttcgagacagggtttctctgtggagccctggctgtcttggaactcactctgtagaccaggctggcctcgaactcagaaatccacctgcttctgcctctaagtgctgggatgaaaggcgtgcgccaacactgtccggcccaccatgcccagttttaagctcgattatttatttaatttaagactggtcttcctgtgtaacccaagctccaacatgttatctgtcgttcagtctctgcgg

SEQ ID NO: 746 - DNA, 146 bp, Mus musculus
  misc_feature (1)...(146): n = A,T,C or G
ggagctggagctacaagcaantgngaaaactactctgcatattactcttcaaaagcagtaacaagtgatcttccacccctctgcctctcctctgcaagaacagcaagtgctcttaacctgttaatcatggagcattttcactagca

SEQ ID NO: 747 - DNA, 208 bp, Mus musculus
  misc_feature (1)...(208): n = A,T,C or G
agactgaggcttggtgcctgcagagacnggagacagagaanacagaggagcatgtcggctcccctgagattggagtgtgaggtcgttgtgagtcaccatgtgcttgctccgaactgaacctaggtcctctgcaggagactcttaattcctgagtcatctctccagcttctggcattagtacttttttaatgtgagaaaattaaaaaaa

SEQ ID NO: 748 - DNA, 357 bp, Mus musculus
  misc_feature (1)...(357): n = A,T,C or G
tattgtagagtttggnatacaggtcaaaggatctgaaggtgatgaaaggngctnccncacatgaanaccaacagcngngtcaactancctggacccctgaatactcccanaaacaacacccaaagaacatacatggacttattcaaggcctgtggcacatatctancnaanaacttgantntccccagngggagaggatgtgcccngttctgtacagactatataccaggnngatacctggggaggtcaccctctcagaggttaaatggagggaagacagagtggggaattctgngagggggtaatgggagatggggcaatatttgggatgaaaataaatatgtgataaaaaaaaaa

SEQ ID NO: 749 - DNA, 331 bp, Mus musculus
  misc_feature (1)...(331): n = A,T,C or G
tactgagattcctggaaatgctctgagaagcagcagcaagtgatacggacaggagaggacagtgaagcagaagctcggggacagaactccacagacactacccatgtggggagagcgtgttgacattgttgacaaaataaaacaacaatccccaacaacancaacaacaacaacaacaacaacaacaacaacagcaacaaccaaccccaaacatgataggaaacagctaataaaaacatncctttatagccagtacaaaggcatgtgtaaaattaatttgaactctgctattgaagaataaaaattactggcctcttgtgaaaaaaaaaaa

SEQ ID NO: 750 - DNA, 198 bp, Mus musculus
  misc_feature (1)...(198): n = A,T,C or G
tttgagaaatatctggaacggttgggagatcccaaggagagtgctggccagaatttcagctganagcaacagctctcaaagctgtttgtgtctccagctactctntgaaccagctcccgacaggaggcaggagactatgcctcagatttacaatttgcatttgaataaagtacctagacttncccgaaagaaaaaaaa

SEQ ID NO: 751 - DNA, 218 bp, Mus musculus
  misc_feature (1)...(218): n = A,T,C or G
agatggggtctggctgtgttgcctatgcttgntntggaacncctggcttnaagtgatcctnccacctnantctcccaagtcactaggattacaggcgtaaacccctgcacctggtcaacctgcaacaaattaaatgcagaagcaaatatgaaaatctgncttctgtaaaaccggatgttaagaaatttgcaaagatgtgaaacctctaaaaaaaaaaa

SEQ ID NO: 752 - DNA, 173 bp, Mus musculus
gactgaggtctcagaagtcagaagaggtcacgtcagctcccctggtggagctggagctacaagcaactgtgaaaactactctgcatattactcttcaaaagcagtaacaagtgatcttccacccctctgcctctcctctgcaagaacagcaagtgctcttaacctgttaaaaa

SEQ ID NO: 753 - DNA, 384 bp, Mus musculus
  misc_feature (1)...(384): n = A,T,C or G
ctggagcccagcatagncattatnggagaggcttcacccatgcaattgatggaaagagatgcaganacccactgccttacatgatnacaaagcctgggaaagagggagaagatganttgggggaaccanaggggtnaaaaacaccaagaaaacctgtanaatcaaccancctgaccccatagnagctcacggagactgaaccaccaaccagggagcctgcagggaaccgacctaggcctctgcacataggtaacagttgtgcagcttgctcttgttaggtgtgggactcctagcagagggagcagaggctgtctctgactcctttggctgcctgtcaagtaaatacattaataaaaacttgnttggaaaatttaaaaaaaaaaa

SEQ ID NO: 754 - DNA, 150 bp, Mus musculus
  misc_feature (1)...(150): n = A,T,C or G
cagcgctgaccccgtgatagaactgaggagctgaaatcaccccgtgtctgnagagnngagcattgntacagctctgctggagaaagagagagaggagagagagagagagagagacagagagggnggagagaaaagagagaaaagagagag

SEQ ID NO: 755 - DNA, 174 bp, Mus musculus
  misc_feature (1)...(174): n = A,T,C or G
tgaggtctcaaaagtnagaagaggtcagtcacgctcccctggtggagctggagctacaagcaactgngaaaactactctgcatattactcttcaaaagcagtaacaagttgatcttccacccctctgcctctcctctgcaagaacagcaagggctcttaacctgttaaaaagaa

SEQ ID NO: 756 - DNA, 214 bp, Mus musculus; identical to SEQ ID NO: 478

SEQ ID NO: 757 - DNA, 271 bp, Mus musculus
actgaggacccaatcaaaggcagcccaaccatctggaatctggaagaagctgggtctagcactcggaaggcagaggaaggcggatatatgagttcgaggccagcctggtctacagagcaagtttcaggacagccagggctaacacagagaaaccctatcttgaaaaacaaccaaaaggggaaaaaaatcaatctggaagaaaagctggcttattagggctaatagtgtgggatttaaatatatacaaccatggcttgctcaaaaaaaaaaa

SEQ ID NO: 758 - DNA, 207 bp, Mus musculus
  misc_feature (1)...(207): n = A,T,C or G
agactgacggagaaaacaccctgggcatagaccatanttacttnttgtggaactcccanaggtcggacaggaancatggctgggtccntacctgaagagccacacacanncgnctttctactgcaccacanattattcggcgggaatcgggtcccctcccccttccttcataactggtgtcgcaacaataaaatttgagccttgatc

SEQ ID NO: 759 - DNA, 178 bp, Mus musculus
  misc_feature (1)...(178): n = A,T,C or G
aagtctgaagaggacagncatgctnccctggtggagctggagctacaagcaactgngaaaactactctgcatattactcttcaaaagcagtaacaagtgatcttccacccctctgcctctcctctgcaagaacagcaagtgctcttaacctgttaatcatggagcattttcactagca

SEQ ID NO: 760 - DNA, 215 bp, Mus musculus
  misc_feature (1)...(215): n = A,T,C or G
tcacagaggtcaccccctctgcctcctggatgctgggattaangatgtttgccaccatgaaatatannanacccantgaaaaaaaccggnggagccacacacggtgcacctttctactggaccananattattcggngggaatcgggtcccctcccccttccttcataactagtgtcgcaacaataaaatttgagccttgatcagaaaaaaaaaa

SEQ ID NO: 761 - DNA, 183 bp, Mus musculus
  misc_feature (1)...(183): n = A,T,C or G
agtcctcacgcctagctagggagctcgtcctcgtcactctgctcactgggtctgccatggctccggtaggtccaganttaaaancccancaaccacatggnggctcacaaccatccgtaanaanatctgactccctnttctggagtgtctgaaaacagctacagngtacttacatataataaa

SEQ ID NO: 762 - DNA, 377 bp, Mus musculus
  misc_feature (1)...(377): n = A,T,C or G
actgaggtttttcttcccgngaanagacaaagaggactactgaagctcttataaagaaaagcatttaattngggctggcttacaattcagagctttaatccattattgtcatggtaggaaacatggcagcacacaagcagacatggngctggagataaatagccaaaagttctttctacatcttcgtctgcaggcagcaggaagtttganagacagngggtctggcttgagcatttgcaacctcaaagaccccaccccacccctgtgacacacttccttcaacaagccacacctaatagccattcccaggngactaagcatttaaatctctgagccacagtataacttcaataaattccttgaaatttgacttaaaa

SEQ ID NO: 763 - DNA, 219 bp, Mus musculus
  misc_feature (1)...(219): n = A,T,C or G
atgagtttgaacactcaccacaagagagggatggcccanagatcaaggaagaggaacaagttatccccaactctccaaacactgggacctggtaaaatagaagagccacgggaggcagaggcaggcggatttctgagttcgaggccagcctggtctacagagtgagttctaggacagccagggctatacagagaaaccctgtctcgaaaaaaacgaaaa

SEQ ID NO: 764 - DNA, 299 bp, Mus musculus
ctgtcagagtttgtcaccagcctctgacgtgcatttataatcatctgctggacatttctacctggaaaatttgaattcttggtattttgcataatgtgttccaagtagagctaattgccctcaacagattggatgatgccaacccatactaagaaggaaaatcttcttgatttagtctactaatccaaatggtaatctcttctggaaacaccctcacacatacaaccagaaataatgtttaaccaggtatcttgagcatttctgtggcccaataaagttgacaaataaaatcaaaaaaa

SEQ ID NO: 765 - DNA, 296 bp, Mus musculus
  misc_feature (1)...(296): n = A,T,C or G
aagcaggttgattcangacttgacctcgctgccgctgagcatgagaccacctggggtggagccttccgacctagccggctctattgttctgtcacctgctgctgctcgtctccaagacactgctacctgctgaaaggcccttgagataatctggagacagcatccagccgatcacctactggctggcgaagggcaccaagaatggattgtttggggggggcgggggaggaatggngggatggggatgggcggcccctctttataagtacagactcttagaaaactttggggccttg

SEQ ID NO: 766 - DNA, 257 bp, Mus musculus
  misc_feature (1)...(257): n = A,T,C or G
tgctaatgatgactcacntgncnnngagccttnngacctntannnttcntttgatntgnnantntgccgctgctctcctccaagacactgctacctgctgagaggcccctgagatattccagaggcacatcctatcctgcacatcctcgcctgcaggctggctccaggcaccaagaatggattggcgggggatgggctttcccctttttaagcacagtctctgagtaaaatctcgggccttgatcagaaaaaaaaaa

SEQ ID NO: 767 - DNA, 319 bp, Mus musculus
  misc_feature (1)...(319): n = A,T,C or G
aagcctcccccagccctgaagcaggttgattcagacttgacctcgctgccgctgagcatgagaccacctggggtggagccttccgacctagccggctctattgttctgtcacctgctgctgctcgtctccaagacactgctacctgctgaaaggcccttgagataatctggagacagcatccagccgatcacctactggctggcgaagggcaccaagaatggattgtttggggggggcgggggaggaatggtggattggggatgggcggcccctctttataagtncagactcttagtaaactttggggccttgaacaga

SEQ ID NO: 768 - DNA, 172 bp, Mus musculus
  misc_feature (1)...(172): n = A,T,C or G
gggtggagcttcctgctcatttgtnctggcangcccantggtggaacctgtgnagccacacactgggcacctttantactggaccagagattattcccgctgggaatnggnttccctnccccttncttcataactgagtgtngcaacagtaaaattggagctttgatcaaaa

SEQ ID NO: 769 - DNA, 385 bp, Mus musculus
agactggtccctactgtaaccagacaggacttcctgtgaagagagaggggcatcaacccacccacaaaaccttcaacccaaaatgtgttctgcctacaagatacacagggataaagatggagcagagattgaggggacggccaaccagtgactgcctaactcgagacccatcccatgggagagagccaacccctgccactattgacactcggctatgcttgcagacagtgtgactccttgacaacagtgtgcctcgttatggttttatgaaaccagttaacagtcttcctccaaggtctctgcttcagtccctgcctccaggaaatgccctgcttgtgtttctgctctgacttcccccagtgatggaatgttaccatggaagata

SEQ ID NO: 770 - DNA, 315 bp, Mus musculus
  misc_feature (1)...(315): n = A,T,C or G
cctcccccagccctggaagcaggttgattcagacttgacctcgctgccgctgaagcatgagaccacctggggtggagccttccgacctagccggctctattgttctgtcacctgctgctgctcgtctccaanacactgctacctgctgaaaggcccttganataatctggagacagcatccagccgatcacctactggctggcgaagggcaccaaaaatggattgtttggggggggcgggggaagaatggtgggatggggatgggcggccccnctttataantacagactcttagtaaactttggggccttgaac

SEQ ID NO: 771 - DNA, 317 bp, Mus musculus
  misc_feature (1)...(317): n = A,T,C or G
gcctcccccgccctgaagcaggttgattcanacttgacctcgctgccgctgagcatgagaccacctggggtggagccttccgacctagccggctctattgttctgtcacctgctgctgctcgtctccaagacactgctacctgctgaaaggcccttgagataatctggagacagcatccagccgatcacctactggctggcgaagggcaccaagaatggattgtttggggggggcgggggaggaatggtgggatggggatgggcggcccctctttataagtncagactcttagtaaactttggggccttgaacagaa

SEQ ID NO: 772 - DNA, 139 bp, Mus musculus; identical to SEQ ID NO: 267

SEQ ID NO: 773 - DNA, 170 bp, Mus musculus
gactgcctttgggattcaacgggagccgctttggactgactggctgccttcctcctcctccccctcctcccccttctgcttcagatttatttattatatgtaagtacactgtagcagttgtaggacacactagacgagggcaccagatctcattgtgggtggttgttacc

SEQ ID NO: 774 - DNA, 100 bp, Mus musculus
  misc_feature (1)...(100): n = A,T,C or G
atgctctctaagacggnctttgcagtggggatcgacggtatacgataagcttcgagcgggatcaattccgccccccccctaacgttactggccgaagccg

SEQ ID NO: 775 - DNA, 283 bp, Mus musculus
  misc_feature (1)...(283): n = A,T,C or G
tcgctgtgcttgcaaagaaaaatctgggtatttcangaagtaacaactgntggntggtttcacacaaaggagtctgagagatggctctccagttaaacgcactggctgtttttccagaggtcccaggtttgagttttccagcacacacatggaggctcacaactctctataactctgactctaaggaatcccgacaacctcttttggtctccaaaggcaccaggcacatatgtgatgcatagacatgaagaaccaatacacataaaaattaaaattaaaaaaa

SEQ ID NO: 776 - DNA, 203 bp, Mus musculus
  misc_feature (1)...(203): n = A,T,C or G
ccctcccccagcctgnacctgcttgctcangggnggagcttcctgctcatttgtnctgccacgcccactgctgnaacctgtggagccacacactggncacctttctactggaccaganattattcngccggnaanctgggtccccnnccccttncttcataactgantgtngcaacagtaaaattggagctttgatcagaaaa

SEQ ID NO: 777 - DNA, 328 bp, Mus musculus
  misc_feature (1)...(328): n = A,T,C or G
ggttcatgccttggcgttctgtcctggttggttgtctgtcaccttgacacaagctggggtcatctgagaagagggagcctcagttgaggaaatgtctctcccacactggcctgtgggcaagtgtgcngtggcattttcatgattggtgtggaggacccggtggccttggtttgtgtatgaaagcaggctgaacaagccataaaggcaagccggtcctcctctatggcctgtccatgagctcctgccttgacttccctccaggatggactataaactgtcagctttgagtctccgatnaagagcacagataaagatggaaaaaaaaaaa

SEQ ID NO: 778 - DNA, 170 bp, Mus musculus
  misc_feature (1)...(170): n = A,T,C or G
tgggttagggcacctgantgctctttcgaaggtccnnagttcaaatcccaacaacnnggngnggggctcacaaccatctgtaacnagatctgactccctcttctggagtgtctgaagacagctacagtgtacttacatataatcaataaataaatctttaaaaaaaaaaa

SEQ ID NO: 779 - DNA, 198 bp, Mus musculus
agactgaggtcccgcggagtcccggaacccagatggcgaccgctgctgctgaggctgaggccgcctcccaagccaggcggacacctgtcctctggtccggatggtggccggttgtctgccttccttgtcttttatataggctggcagccgaaggtgtcgcctaattaaaggtgtgtctttgtatctcaaaaaaaaaaa

SEQ ID NO: 780 - DNA, 229 bp, Mus musculus
  misc_feature (1)...(229): n = A,T,C or G
ggggaccgtggcttcttctacaccccatgtcccgccgngaagtgnangacccacaagttnttctggaacactganngnnctngcaggggtgctgtnttcannttccagcncccacatggttgctcacagncatctgnaatgatatctcataccctcttgnggtgtgtctgaagacagctacagtgtacttaaataaactaaataactaaancttgaaaaaactgtttta

SEQ ID NO: 781 - DNA, 265 bp, Mus musculus
gcgtggattcttctcacacccatgtcccgccgcgagtggaggacccacaaggtccctcaaaacacagagaccttgggactggagagatggctcagcggttaagaacactgactgctcttccaaaggtcctgagttcaactcccagcaaccacatggtggctcacaaccatctgtaatgagatctgacgccctcttctggtcttcagacacacatgtaagaaactgctgtatacataatgaataaataaatctttaaaaaaaaaaa

SEQ ID NO: 782 - DNA, 179 bp, Mus musculus
  misc_feature (1)...(179): n = A,T,C or G
gggtggagcttcctgctcattagttctgccacgcccactggtggaacctgtggagccacacactgtgcacctttctactggaccagagattattcggccgggaatngggtnccctnccncttncttcataactgagtgtngnaacagtaaaattaggagctttgatcagaaaaaaaaaa

SEQ ID NO: 783 - DNA, 370 bp, Mus musculus
  misc_feature (1)...(370): n = A,T,C or G
tgaggtaactgaggatcccngccaacccagggnttacatanactggngcnncantntaccngggaactatatnccccaccntatcanaatgacttgaaccanggcctngntatgtaactgtgcagccatggtggctgggaacccctatctcctgcctttgtctcactaacntagaaccangnnctagctaatgggggngggcgggccatggnggctgagaacccctatctcctgcctttgtctgctaagtgntggctttatttatttatntatttatttannnatttattaatatttngaggcagggtctctgaacacaagagaancgccntccctgcctcccaagttntaggattaaaagcatgtgcct

SEQ ID NO: 784 - DNA, 128 bp, Mus musculus
  misc_feature (1)...(128): n = A,T,C or G
atgggtgggctccataaacgcnaacagctnnnnaaggcncagatctttcccagcntgggaaagatcctccctcctccctccctccctccctccctccttccaccatacactcaataaaataaaataaa

SEQ ID NO: 785 - DNA, 215 bp, Mus musculus
  misc_feature (1)...(215): n = A,T,C or G
gactgagataaagaaacccgccgccaggttgacatcanncatagcctggaactgatggttgtgagctgtcacatggagaatcgaaattgaacctgggtcctctggaagggcaaccaatatccttaactgctgagctatttctccagccccttccaccatcggttctcttggcagagaaaacaagagaaaaaggacactatggaaaaataaagaaa

SEQ ID NO: 786 - DNA, 285 bp, Mus musculus
  misc_feature (1)...(285): n = A,T,C or G
ggaagcctgggctggccttgaactcactgggatacccaaggatggcactgaacttctcatccttctaatnggccaagngttaagatttcaggtatgggctggtgagatggctcantgggtaagagccgcccgactgctcttccgaaggtctgaagttcaaatcccagcaaccacatggtggctcacaaccatctgtaacaagatctgacgccctcttctggagtgtctgaagacagctacagtgtacttacatataataaataaataaatctttaaaaaaaaaaa

SEQ ID NO: 787 - DNA, 127 bp, Mus musculus
actgagagaaagtgtgctgagaaaccaggaggaaacaagagctgggtgtaacagcacttgggacgcagtgagttccaggctagcctgatctacatagagaaagcctaccaagagaagaaagaaaaaa

SEQ ID NO: 788 - DNA, 266 bp, Mus musculus
  misc_feature (1)...(266): n = A,T,C or G
ttctctgtgtagttctggctgtcctagaactcagagatncacctacctctgattcaaaggactaggattaaatgcccggttaaagaagatactccagggctggagagatggctcagtggttcagatcacagactgctcgtccagaggtcctgagttcaattcccagcaaccacaaggtggctcacaacacctcttctggtgtgtctaaagacagcaacagtgtattcatgtacattaaatgaataaataaattgtaaaaaaaaaaa

SEQ ID NO: 789 - DNA, 378 bp, Mus musculus
  misc_feature (1)...(378): n = A,T,C or G
agaattcctggtcctnatcacacgagcanctgacaaggtttcctggggncgcnctngctntnaaccatgtangngccttgaactcanagatctgcctgcttctttctcctaantgcagggactatagacatgtaccnncacncctgactnaagaaantacttttgnctnatagaaagncattnaaaacctactaaactggggctggagatgactctgtatttaagagtactgtctgctcttccanangacctaggttnaattcccancacttacntggcaggtcacaactgtctctaactccagttccaggggatccaacattctcaatacaaacatacattgaggcaaaacaccaaagcatgttaaaaaaattaaaa

SEQ ID NO: 790 - DNA, 208 bp, Mus musculus
  misc_feature (1)...(208): n = A,T,C or G
aactgaggcttggtgcctgcagagacagggagnaggagaagacagaggagcatgtcggctcccctgagattggagtgtgaggtcgttgngagtcaccatgtgcttgctccgaactgaacctaggtcctctgcaggagactcttaattcctgagtcatctctccagcttctggcattagtacttttttaatgtgagaaaattaaaaaaa

SEQ ID NO: 791 - DNA, 251 bp, Mus musculus
  misc_feature (1)...(251): n = A,T,C or G
cctgtcagtttatccctgtcatctttccttctgctctggagtccancgctgaccccgtgatagaactgaggagctgaaatcaccccgtgtctgcggagttgagcattgctacagctctgctggagaaagagagagaggagagagagagagagagagagagagagagaggagagagaagagagagaagagagagaanaagaaagagagaagagagtgagaggagagagagaggagagagagaagagagaaaa

SEQ ID NO: 792 - DNA, 208 bp, Mus musculus
  misc_feature (1)...(208): n = A,T,C or G
ctgaggcttggtgcctgcagaagcagggagcnaggagaagacaggaggagcatgtcggctcccctgagattggagtgtgaggtcgttgtgagtcaccatgtgcttgctccgaactgaacctaggtcctctgcaggagactcttaattcctgagtcatctctccagcttctggcattagtacttttttaatgtgagaaaattaaaaaaa

SEQ ID NO: 793 - DNA, 156 bp, Mus musculus
  misc_feature (1)...(156): n = A,T,C or G
gactgagagtgtcacntaagtagccctggcaggctagtctggaaacttgatgtgtggactaggctgacctccatccaattcacagaaagccacctgctcctgcctcccaagtaccgggataaacatgtatgctatatgcccaggtcatgtaaagta

SEQ ID NO: 794 - DNA, 500 bp, Mus musculus
  misc_feature (1)...(500): n = A,T,C or G
agagacagaacacctggcagttagtggngggattggataaaccagctgtgtctaaagaaaaggcagaaatatgcaagttacagccaagagcaataaggggaaagacgggcccctgaaaggcagcagcgagacagcttaaatgcaccaatgaggagaaatgaatatttcaagggaatctgangacnctcagatggtggctttctgctcatatggcaaaagatacagcacaatgggatgacgctgttaaattaagcattctggaatagatggtagtattctcactttttaatataatcacgtttttcaggtttaaaaagttgtttcatggctggggatgtagctttgtggtagagtgcttacccccttacctagcacgttcctgttttaacacttantgaaagggggagattttttccattgttttacttaaaggagccagttctggcttttaaaatgtcattttgtaataaaagtgtancccaattctgttgcttttaaaa

SEQ ID NO: 795 - DNA, 207 bp, Mus musculus
  misc_feature (1)...(207): n = A,T,C or G
gactgaggcttggtgcctgcagagncaggagncagagaagacagaggagcatgtcggctcccctgagattggagtgtgaggtcgttgtgagtcaccatgtgcttgctccgaactgaacctaggtcctctgcaggagactcttaattcctgagtcatctctccagcttctggcattagtacttttttaatgtgagaaaattaaaaaaa

SEQ ID NO: 796 - DNA, 214 bp, Mus musculus
  misc_feature (1)...(214): n = A,T,C or G
gaggaggagcaaaagaagaaggaggaagaggagaaggagaaggagatgatgatgactaccacttctgggaacaaagaagtgggggataccccagtggtaccagacacaataacttttttgctggtgtcttgaaaattaaaatccattcttcattctntgctgttttctctacggcntttgnaataaaatttctcattctgcctaaaaaaaaaaa

SEQ ID NO: 797 - DNA, 558 bp, Mus musculus
  misc_feature (1)...(558): n = A,T,C or G
ttgtacatggtggtgctggactgtgccaactgcnggcgggnctccttcaattgttgctgaagaactagaatggtgctctgcataccctctacttcttcatcaagttgaatgatgaagtcattcagttctgtgcaaaggagagccaaactttagtatcttaattttttgtttgtttgttttctgtatagccctgggngtcctggaactcactctgtagacaggctgtcctcgaactcagaaatccacttgcctttgcctcccaagtgctgggattaaaggcgtgcaccgccaccgccaccaccaccacccggctaatatcttaacattttaaaacatttctctgctgtatgtacacacacccactcacctgtgtatgtgtgtgcattgagaggccagaagtcaacaccagatgtctcttttctacagctttttacttctcattgaacctggaacctacccttctggctaggctagttgaccaccaagaccccaaaatagattcttttaaagaatttactttggaattntaatcaccacgaaggaacatttggagggtgg

SEQ ID NO: 798 - DNA, 291 bp, Mus musculus
  misc_feature (1)...(291): n = A,T,C or G
gctgtactgggaatcaaaccccaagcttcataaatgctagatggagtttttctgtgtaacccttgtccagaaactctgtagaccaggctgacctcaaactcagagagatctgcctacctctgtctcccaagttctgggatnaaaggncgggggtgctgaaagaccctcgagggaagaccctcactnagacacccaagtcccgggacagtcgcgtacccaagaagacactgagaccatacataaaatgtagaaggcangatttaatanagcagcgacatgaaagcaaaaaaa

SEQ ID NO: 799 - DNA, 455 bp, Mus musculus
  misc_feature (1)...(455): n = A,T,C or G
gaagcgtccacccagcagctgactcagacagatacagacacccacagtggatggaacttggagactcttatggaagaataagaanaattgtgggcctgaaggggataggaactccacaggaagatcaatagaatcaactaagttggaccctggttgctctcagagtcctgaaccaccaaccagagaacatgcatgggctggacctaggcctccccacacatatgtagtagatgtgcagcttggtctttatgtgggtcccgaacaaatggaacaggggctatcccaaaacctgttgcctgtggatggaatatgttcttttagctgggctgncttggctggcctcagtggaagaggaagcacctagtcttgcagagacttgaagtgccagggttgagggatacccacaggggtcccaccagctcanagaaaggggtgaagagattggggaagaattg

SEQ ID NO: 800 - DNA, 177 bp, Mus musculus
  misc_feature (1)...(177): n = A,T,C or G
ctctcatggaagaagagcaggacntaccagagcatccgtcgacgtgcctccttcangtnaattccagctggntacncgcnagatctaagagactatnntannactcctatgcatcctacagngngaggnccngntccgccaggacctcacagagaaaccctatctcaaaaaaaaaaa

SEQ ID NO: 801 - DNA, 134 bp, Mus musculus
  misc_feature (1)...(134): n = A,T,C or G
gactgagaagggtttctctgtgtatccctggctgtcctggactcactctgtagaccagcatggccttgaacttacagaganntgnttgtctttgcctcctgcgtgctgngattaaaggcatgggccactacgac

SEQ ID NO: 802 - DNA, 117 bp, Mus musculus
  misc_feature (1)...(117): n = A,T,C or G
cacgtgcacctttatactggaccagagattattcggccgggaatctgggtncnctccnccttncttcataactgagttgtngcancagtaaaantggagctttgatcagaaaaaaaa

SEQ ID NO: 803 - DNA, 213 bp, Mus musculus
  misc_feature (1)...(213): n = A,T,C or G
ctcccctcccccagcctgaaacctgnttgctcangggtggagcttcctgctcattngtnctgccacgcccactggtggaacctgnggagccacacactgtgcacctttctactggaccagagattattcggccgggaatctggntnccntnccncttncttcataactgantgtngcaacagtaaaattggagctttgatcagaaaaaaaaaa

SEQ ID NO: 804 - DNA, 190 bp, Mus musculus
  misc_feature (1)...(190): n = A,T,C or G
tgggctcaggccataatnacttcttgtgntaactctcaagggncnnacaggaagcaaggcttgggtncataacacagagcacctttactactggaccagagattattcgncgggaatngggtnccttnccccttncttcataactgagtgtngcaacagtaaaattggagctttgatcagaaaaaaaaaa

SEQ ID NO: 805 - DNA, 182 bp, Mus musculus
  misc_feature (1)...(182): n = A,T,C or G
cctgcttgctcatggnnggagcttcctgctnattagttctggcacgcccactgntggancctgnggagcnacncactgtgcacctttctactggaccnggagattattnccgccggcaattggntncnntcccccttgcttcataactgagtgtggcaacagtaaaattggagctttgatca

SEQ ID NO: 806 - DNA, 188 bp, Mus musculus
  misc_feature (1)...(188): n = A,T,C or G
ttgctcatgggtggagcttcctgctnattagtnctgccacgcccantggtggaacctgnggagccacacactgtgcacctttctactngaccagagattattcgcgccgggaatctggnttccntcccncttgcntcataactgagngtggcaacagtgaaattggagctttgatcagaaaaaaaaaa

SEQ ID NO: 807 - DNA, 505 bp, Mus musculus
  misc_feature (1)...(505): n = A,T,C or G
aactgagggcccttccttagaactacatttgtagtcntgatgatntccactaaaagtgcangcccgncgggtgtggtggcacacacctttaatcccagcactcagaagacagagaggcaggnnnntgtctgagttcnaggccagnctggtctacaaagngagttccangacagccaggtctatacagagaaaccctgnctcaagtgcaagccctanctccgatgagagcttgttttcaccttcatccctcagtggacttgaatattccccaaccacttntgcacccttcagccatggtcctgagtcccaccgcatcccctttaaactgaggcgcctactcatccggatcctctgactgcaggaggctcccacatcaccacccgcaaagagggagctcttcttttttggggggagggagctctatctctgggtgcttttcttttgcctttatttttacgtaaagtccaaagtaaaataacattttaaatcaactgaaaaaaaaaaa

SEQ ID NO: 808 - DNA, 171 bp, Mus musculus
  misc_feature (1)...(171): n = A,T,C or G
gaactgaggtgatgccatctacgagctgagttttacagcctgaatggttcttccatcatggagtcagttgtgctatggnctggggccctgcttcagaggcaagaggatcaggtcctcagagtcatccttggctacatactgagctggaggccaattggagctgtagaaggc

SEQ ID NO: 809 - DNA, 115 bp, Mus musculus
  misc_feature (1)...(115): n = A,T,C or G
tctgccgcgcccacatgntggaacctgaggagccanacacgngcncctttntactgnaccngagatnattnctggatggaatcagggncccctcccccttccttcataactggtg

SEQ ID NO: 810 - DNA, 256 bp, Mus musculus
  misc_feature (1)...(256): n = A,T,C or G
gtaccttgatggccgggctcagaaaattcaatgatgcctctcacactaataccatgactganggctggagagatggctcagaggttaggaacactggcttgcctaccagaagacccatgttcaactcccagtcctacatggcagcttacaactgtgactccagtttcaggngctctgatacccttacacagacatgcatgcaagcaaaacaccagcgcgcatgaaataaaagtaaatacctttttaaaaaaaaaaa

SEQ ID NO: 811 - DNA, 320 bp, Mus musculus
  misc_feature (1)...(320): n = A,T,C or G
gcaccacagctcatggctggcttcntataactatctccttgtatctagaagacctgtgccactgtaccctgatggncgggctcagaaaattcaatgatgcctctcacactaaaaccatgactcataggctgganagatggctcagtggttangaacactggcttgcctaccataagacccangtncaactcccagncctacatggcagcttacaactgtgactccagtttcaggtgctctgatacccttacacagacatgcatgcaagcaaaacaccagcgcgcatgaaataaaagtaaatacctttttaaaaaaaaaaa

SEQ ID NO: 812 - DNA, 184 bp, Mus musculus
  misc_feature (1)...(184): n = A,T,C or G
gtacctgtccgttgctccnatgtnngatacgaaggatcctttnntggggagcntcgatgcagccgnntcctcttaccatctctctgccattcttcaagtcccagntatggcagccaaaatgtnncaggccgccannagctcgcaacgtgaacggntngantgagaaggccgctcgagcttgtac

SEQ ID NO: 813 - DNA, 391 bp, Mus musculus
  misc_feature (1)...(391): n = A,T,C or G
aaacagacaagcacccgncacctcanaaaatgttctacatagtaacttctggaaccactctncanctctcaccagcagctccgaggggcccaggaggtccaaggtgagcgattgaatgcggnagaagcgcacacccagctcccggtggacaccggagcactggatgcatgacatcactcccacaagagcctggatgcccttctcactccttncaagagggctccctgtctgcagtgctagctcagcgggtaggagcactggctcttcttcacaagatggagattcggttcccagcacccacgtggcagctcactgctttctgtaaccccagttctcggggacccaacaaaaatatcaatacacataaaatagaaataaatcattaagaggg

SEQ ID NO: 814 - DNA, 501 bp, Mus musculus
  misc_feature (1)...(501): n = A,T,C or G
ctggaggctggagctgaggcagaagccatgaagggntgctgcttactggcttgctctacatagattgctcagcctgctttcttatagaacccaggaccaccagctcaaaggtggccctgcccacagtatgctaccccttccatatcaatgattaatcatgaaaactgcaccacaggccattctgttgggagcattttccctcttgaggttcctcttccaaactgagtctagtatgtgttaagctgacttaaaactgtgtggacaaagctttcctgaaaagcctcaacatcacgggaaataatcccaagagctatcaaatacatttgcataaaatctaaaagctttggcaccgaaaagacaagaattacctggagaaacagacatagaatagaacaaagtcttcccactgcctgtcagatggtgttactatttagactacacaggaaatgcanagttaaataccagaaaattgtctattcantaaatgtgttaatggaccaa

SEQ ID NO: 815 - DNA, 318 bp, Mus musculus; identical to SEQ ID NO: 181

SEQ ID NO: 816 - DNA, 238 bp, Mus musculus; identical to SEQ ID NO: 222

SEQ ID NO: 817 - DNA, 355 bp, Mus musculus
  misc_feature (1)...(355): n = A,T,C or G
gggttccaagactgccctttgggattcaaacgggagccgctttggactgactggctgccttcctcctcctccccctcctcccccttctgcttcagatttatttattatatgtaagtacactgtagcagttgtaggacacactagacgagggcaccagatctcattgtgggtggttgtgaaccacccaccatgnggntgctgggntttgaacncaggatcttcagaagagcantnagggctctaaaccgntganccatctctccagcctcctgcattccttcttaaggcatgaatgatcccagcataggaagacagtctgccctccctncttttcaagccatttccctttcaccat

SEQ ID NO: 818 - DNA, 224 bp, Mus musculus
  misc_feature (1)...(224): n = A,T,C or G
gactgccctttgggattcaaacgggagccgctttggactgactggctgccttcctcctcctccccctcctcccccttctgcttcagatttatttattatatgtaagtacactgtagcagttgtaggacacactagacgagggcaccagatctcattgtgggtggttgtgaaccacccaccatgtggntgctggganttgnactcaggatcttcagaagagctgt

SEQ ID NO: 819 - DNA, 349 bp, Mus musculus
  misc_feature (1)...(349): n = A,T,C or G
tattatatgtaagtacnctgtagcagttgtnngacacactctacgagggcnccagatctcattgtgggnggctanagnccncatatcatgggctgcnactatgggctcaccttcacccanangnggagtacngacggtactcttgggacagaccttttttgngagaatntgcatggctgangggttnaaactgactctcgataccatatttntaccatncnctccnatccttttagtgccattttcccggcctcctattgccngnattgntnnantctcggcagtaatgttgatntnnatttttctggaccgaccatctatggctgtctgnnttggcctttgaaggttg

SEQ ID NO: 820 - DNA, 210 bp, Mus musculus
  misc_feature (1)...(210): n = A,T,C or G
gctggtgagacggctcagtgggtaanagcaccggactgctcttctgaaggnccagagntcaaatcccngcaaccacatggtggctcacaaccanccgtgagatgccaggacttgnaaggtgaaaccaactaactcccccatttccgtaccctccctcttcccttcaaaaatatctcaacacccatattcagcttaaagaagttataaaaa

SEQ ID NO: 821 - DNA, 147 bp, Mus musculus
agactgagagtgtcactaagtagccctggaaggctagtctggaaacttgatgtgtggactaggctgacctccatccaattcacagaaagccacctgctcctgcctcccaagtaccgggataaacatgtatgctatatgcccaggtca

SEQ ID NO: 822 - DNA, 271 bp, Mus musculus
  misc_feature (1)...(271): n = A,T,C or G
ggcagtctcagactgagtatgtcacttctccnanatacatctcnttcctttggcnngnngaacactaacccctctcctactccaccaagaggagacctccancagataattgtcagttngacagaatcctgtcgaagctgtagccatgcccttgtaccanctatcctggaactccatctgtagaccaggctggactcaaactcaggagatctgcctgccgctgctttccaagtgttggaagtaaaggcgcgtgctaccatgaaaaaaaaaa

SEQ ID NO: 823 - DNA, 308 bp, Mus musculus
  misc_feature (1)...(308): n = A,T,C or G
cctgaacaggttgattcagacttgacctcgctgcccgctgagcatgagaccacctggggtggagccttccgacctagccggctctattgttctgtcacctgctgctgctcgtctccaagacactgctacctgctgaaaggcccttgagataatctggagacagcatccagcccgatcacctactggctggcgaagggcaccaagaatggattgtttggggggggcgggggaannaatggntgggatggggatgggcngcccccctctttataagtacagactcttaataaactttggggccttgaaca

SEQ ID NO: 824 - DNA, 135 bp, Mus musculus
  misc_feature (1)...(135): n = A,T,C or G
tgaacattgaccttcntnactgctgatatcagtgcgatagctgtctcctgcttcttctactatgcctcccccttccatgatggactgtactctgaaactgtgagccaaaatatacactttttttatgttgaaaaa

SEQ ID NO: 825 - DNA, 148 bp, Mus musculus
acttggtttaaagcctatgaagtgacgacaggagggacaagaagtccaaaggcatccttcaatacataatccaatccagcctggtctacagcgtgagttccaggacaaccagggctacacagagaaaccctgtctcaaaaaaaccaaa

SEQ ID NO: 826 - DNA, 205 bp, Mus musculus
  misc_feature (1)...(205): n = A,T,C or G
gactgaggcttggtgcctgcaganaagggagaagagaagnagaggagcatgtcggctcccctgagattggagtgtgaggtcgttgtgagtcaccatgtgcttgctccgaactgaacctaggtcctctgcaggagactcttaattcctgagtcatctctccagcttctggcattagtacttttttaatgtgagaaaattaaaaaaa

SEQ ID NO: 827 - DNA, 324 bp, Mus musculus; identical to SEQ ID NO: 201

SEQ ID NO: 828 - DNA, 175 bp, Mus musculus
  misc_feature (1)...(175): n = A,T,C or G
ggagcttcctgctcattngtnctgccacgcccactggtggaacctgtggagccacacactgtgcacctttctactggaccaganattattcggccggnaatctggntncnntcccccttgcttcataactgantgtngcaacagtnaaattggagctttgatcagaaaaaaaaaa

SEQ ID NO: 829 - DNA, 237 bp, Mus musculus
gactgagtgttttgcctgtgtgtatatatgtacacgtatgtacaccatgtcatgagcctccatggtcgtgagaggactttggatcccttggaactggcgttacattggtcgtgagcctccatgttggcgctgagaagcaaacctgggttctctggaagcgcagcaagtgctcttaaccatcgagccatctctccatctcaaaccacccatgtatataaaatgaaaatacataaacca

SEQ ID NO: 830 - DNA, 378 bp, Mus musculus
  misc_feature (1)...(378): n = A,T,C or G
gactgaggttctctgtttaacactgtcctgccgagagcttgctgtgtagaccaggatggccttgaattcatggagttccacctgcctgctttttctccagantgctgagattaaaagtgtgcaccaccatgcggggcagggcccaacattgngatagtattctcttcaccactaagaatattaaacaccgggctggagagatggctcagtggttgagagcactgaatgctcttccagaggtcctgagttcaaatcccagcaaccacatggtggcgcccaaccatcggtaatgagatctgacgccctctcctggagtgtctgaagacagctacagtgtatttacagataataaaataaataaatcttaaaaaaaaagaa

SEQ ID NO: 831 - DNA, 228 bp, Mus musculus
  misc_feature (1)...(228): n = A,T,C or G
gttccagatgccttttgagaataaaatgggaggccagaaccaaagtcttttgaataaagcaccacaactctaaaaagtangganaaaagtcctaaccccaantccnaanctttccnngnatgggaaanacctccctccctcnctcccttantccctccctcccttttganccatttncactcttccnccatanactcaataaaataaaatataataaaataaaataaa

SEQ ID NO: 832 - DNA, 241 bp, Mus musculus
gggattatattatacataagaacatgtagctgtcttcagatgcaccagaagagggcgtcagatctcattacggatggttgtgagtcaccatgtggttgctcggatttgaactcagggaccttcggaagaacagtccgtgctcttaccctctgagccatctcaccagccctgatctccattgtatgtgcatgcacatgtaaataaacataataaaacatcgtaagtcttgaaaaaaaaaaca

SEQ ID NO: 833 - DNA, 177 bp, Mus musculus
  misc_feature (1)...(177): n = A,T,C or G
ccacgaagagggcgtcagatctcattacgnnatggntgtgagtcaccatgttnttgctcggatttgaactcaggaccttcgnaagaacagnccgngctcttaccctctgagccatntnaccagccctgatctccattgtatgtgcatgcacatgtaaataaacataataaaacatcg

SEQ ID NO: 834 - DNA, 257 bp, Mus musculus; identical to SEQ ID NO: 666

SEQ ID NO: 835 - DNA, 175 bp, Mus musculus; identical to SEQ ID NO: 673

SEQ ID NO: 836 - DNA, 162 bp, Mus musculus
ctgccctttgggattcaaacgggagccgctttggactgactggctgccttcctcctcctccccctcctcccccttctgcttcagatttatttattatatgtaagtacactgtagcagttgtaggacacactagacgagggcaccagatctcattgtgggtgg

SEQ ID NO: 837 - DNA, 280 bp, Mus musculus
  misc_feature (1)...(280): n = A,T,C or G
aagcctggactggccttgaactcactggatacccaaggatggcactgaacttctcatccttctaattcccaagtgttaaganttcangtatgggctggtgagatggctcagtgggtaagagcgcccgactgctcttccgaaggtctgaagttcaaatcccagcaaccacatggtggctcacaaccatctgtaacaagatctgacgccctcttctggagtgtctgaagacagctacagtgtacttacatataataaataaataaatctttaaaaaaaaaaa

SEQ ID NO: 838 - DNA, 242 bp, Mus musculus
aaggtggggtctttcccctgaagcccagaaccagcccacccaaggccccagacatgttcctgtcacagctgctcacattctgatgaacagccatgagaacagagaaaatgaagcacacctgaagactccctgttcaaaagagactgagcctcctgcttcttctctgccatcagaaactgtgtgtaagtgagttccaggacagccagggctacagagaaaccctgtctcgaaaaaccaaaaaa

SEQ ID NO: 839 - DNA, 100 bp, Mus musculus
  misc_feature (1)...(100): n = A,T,C or G
cgctgggctggcctgctgtggtgcctncctnccagganagactctagcagctttnggaaccataagccanatnaacccttccttccataggacacaaaaa

SEQ ID NO: 840 - DNA, 293 bp, Mus musculus
  misc_feature (1)...(293): n = A,T,C or G
agttggcagagcctgcnnttntcttntggatcaaactgatgtngctgattcgagaactgagctaccactgctgattcctgacantgaanattggaatcgcctcatagaactctntctaaacaggaccgnatntncntttgccctattaacctttnccttccactacctntggcgggtggngggctnnaagagaggttanagcattgangaaccctttttaaaggaggnttgtncnaanctaagcgtgcagaagacagctgnaaaagtaantaanaaagcttattctcagagtg

SEQ ID NO: 841 - DNA, 407 bp, Mus musculus
  misc_feature (1)...(407): n = A,T,C or G
gaactggtcacctactgtaaccagacaggacttcctgtgaagagagaggggcatcaacccacccacaaaaccttcaacccaaaatgtgttctgcctacaagatacacagggataaagatggagcagagattgaggggacggccaaccagtgactgcctaactcgagacccatcccatgggagagagccaacccctgccactattgacactcggctatgcttgcagacagtgtgactccttgacaacagtgtgcctcgttatggttttatgaaaccagttaacagtcttcctccaaggtctctgcttcagtccctgcctccaggaaatgccctgcttgtgtttctgctctgacttcccccagtgatggaatgttaccatggaagatannataaatctttcccacatca

SEQ ID NO: 842 - DNA, 256 bp, Mus musculus
gattgctgccaggctatgggtgtcccaggtactgacaggacccaccattgctgtctttaagaaacttgctgggggctggcgagatggctcagtggttaagagcatcaactgcttttccgaaggtcccgagttcaaatcccagcaaccacatggtggctcacaaccacccgtaaagaaatctgatgccttcttctggaagatctgaggacagctacagtgtacttacatataataaataaatctttaaaaaaaaaaa

SEQ ID NO: 843 - DNA, 178 bp, Mus musculus
  misc_feature (1)...(178): n = A,T,C or G
tatgcctgttcattgctgcttcctggatgcccnattntaangccnataaactattgttgcttaactggtccacaactctgtttcctatctttccccatgacctttgctgggtggtgggctaaaagggaggttgaagcgtttaagaacccttattaaagtaggtttggaaaaaaaaaaa

SEQ ID NO: 844 - DNA, 239 bp, Mus musculus
tataaacagtaagaactgctgaggagaacagactagcctgctgcctggaagagactcagacctgcctgaaggagagattctctgtcctgttgagctctccacaagtagtgtaatgaactccagggttcctgctcttggtgatgtagctatatttgagttgaccctgcccctgcccttgcccttttacttatattcttgtgaataactctaataaactcattggattaccaaaaaaaaaa

SEQ ID NO: 845 - DNA, 206 bp, Mus musculus
agctgccaaaagaagagagtttaccctggctgccttcaggatacagtccccatctgctgcctgtggatcaagatagaagacttctgactcctccagcaccatgcctgcttgtatgctgccgtgcctcccaccatgatgataatgcactgaacctctgaagctgtaagccagccccaattaaatgttgtcttttataagaaaaaaaa

SEQ ID NO: 846 - DNA, 246 bp, Mus musculus
  misc_feature (1)...(246): n = A,T,C or G
ggccttgcttggaagagatgatccntaactacaatgagctaagcanaagnttaagatcaatgtactgnngctggngaganagctcantgggtaagagcacccgnctgctcttgntnangtccggagttcaaatcccancaagcacatggtggctcacaaccatccgtaacaagatctgactccctcttctggagtgtctgaagacagctacagcgtacttacatataataaataaataaataaaaa

SEQ ID NO: 847 - DNA, 254 bp, Mus musculus
gatgctgccggctatgggtgtcccaggtactgacaggacccaccattgctgtctttaagaaacttgctgggggctggcgagatggctcagtggttaagagcatcaactgcttttccgaaggtcccgagttcaaatcccagcaaccacatggtggctcacaaccacccgtaaagaaatctgatgccttcttctggaagatctgaggacagctacagtgtacttacatataataaataaatctttaaaaaaaaaaa

SEQ ID NO: 848 - DNA, 246 bp, Mus musculus
ggctatgggtgtcccaggtactgacaggaccacaccattgctgtctttaagaaacttgctgggggctggcgagatggctcagtggttaagagcatcaactgcttttccgaaggtcccgagttcaaatcccagcaaccacatggtggctcacaaccacccgtaaagaaatctgatgccttcttctggaagatctgaggacagctacagtgtacttacatataataaataaatctttaaaaaaaaaaa

SEQ ID NO: 849 - DNA, 489 bp, Mus musculus
ctgaagagttctgaatccacgcagttgaatccttctcagcagtctgttttgcaggaacctttattaacaccgctccccagctgaagagttctgaatccacgccggatccttctcagcagtctgttttacgggaacctttattaaccgctccttcccgcgatgcagttctgaatcctccctgtagtagggggtctttgctcgtgcctgaagatgtttcttgtcccgggtttcggcaccacttcttgcgcgcgctcgactggccaggaagaacgacgctgcaacaggatccttctgcacacgtttattgggagagcttgattgtagaggcgaaaagactttttgcccagagctggtgctgcttttataggcctaggagaggcgtgtctcataccctgattggttatgcactaagcctcatttgcatgttcctcatctgattggctactctctctcagtacctcacagagcctcattatcataaaaaaaaaa

SEQ ID NO: 850 - DNA, 234 bp, Mus musculus
actgctgaggagaacaagactagcctgctgcctggaagagactcagacctgcctgaaggagagattctctgtcctgttgagctctccacaagtagtgtaatgaactccagggttcctgctcttggtgatgtagctatatttgagttgaccctgcccctgcccttgcccttttacttatattcttgtgaataactctaataaactcattggattaccagattggaaaaaaaaaaa

SEQ ID NO: 851 - DNA, 228 bp, Mus musculus
  misc_feature (1)...(228): n = A,T,C or G
ctgaggtgcctcagatcccaatgttaattaccacagagcacataaattacttcaataactggttaaactaagcctnaaacctgcttgctcggagtgnagcttcctgctnattngntctgcnacgcccactgctggaacctgaagagccacacacgngcacctttctactggaccacanattattnggcgggaatcgngtcccctcccccttccttcataactagtgtc

SEQ ID NO: 852 - DNA, 215 bp, Mus musculus
  misc_feature (1)...(215): n = A,T,C or G
attaaagactgaggcttggtgcctgcagagacaggagacagagaagacaganggagcatgtcggctcccctgagattggagtgtgaggtccgttgtgagtcaccatgtgcttgctccgaactgaacctaggtcctctgcaggagactcttaattcctgagtcatctctccagcttctggcattagtacttttttaatgtgagaaaattaaaaaaa

SEQ ID NO: 853 - DNA, 219 bp, Mus musculus
  misc_feature (1)...(219): n = A,T,C or G
gtgctttgcctgcatatatgtctatgcaccaagcctgaagaggacatcaagatttcttggaactgaagtcacacaaattgtaagctactatgtgtgtgctagaaattgacctgagtcccatggaagaacaactggtgctcttaaacactaagccatctctccagcccccactgaanattttttttaacncaatggaaanatgtgccttaaaaaaaaaaa

SEQ ID NO: 854 - DNA, 166 bp, Mus musculus
ttccagactgccctttgggattcaaacgggagccgctttggactgactggctgccttcctcctcctccccctcctcccccttctgcttcagatttatttattatatgtaagtacactgtagcagttgtaggacacactagacgagggcaccagatctcattgtggg

SEQ ID NO: 855 - DNA, 369 bp, Mus musculus
  misc_feature (1)...(369): n = A,T,C or G
tctgaggtcagagcctgggcccaggccatnaattgntctntggggnactctgacagggcggncagnnancntggnatggctaccatnttncnctgnagaaagnnaaagcctnacggtttcttctggaatgaacagccattgctgattcgcaaaggtgtttgcaagcagactgagctaccactgttgatttctgtgatcttaacggctgatatcctgacagtgcagatagattcacctcaaagaagtacttctaaacaggtccacatccttctgtgctctattaacctttccttttcacggtctggtgggtgatggactagaggggaggttaaagcacctaagaacccttattaaagtggatttgaaaaa

SEQ ID NO: 856 - DNA, 176 bp, Mus musculus
gggttccagactgccctttgggattcaaacgggagccgctttggactgactggctgccttcctcctcctccccctcctcccccttctgcttcagatttatttattatatgtaagtacactgtagcagttgtaggacacactagacgagggcaccagatctcattgtgggtggttgt

SEQ ID NO: 857 - DNA, 307 bp, Mus musculus; identical to SEQ ID NO: 514

SEQ ID NO: 858 - DNA, 134 bp, Mus musculus
gaactgagagcccttggtgctaccacttctgagcatctggatgtctctgcagtgttggggtactactagtgtgtctgaagacagctacagtgtactcatatcaaatatataaatatttaggggaaaaaaaaaaa

SEQ ID NO: 859 - DNA, 112 bp, Mus musculus
tcttactggatatacataacacacgcatactgcaaatgtggagcacatgcatcgaccgcacaggaaatactcatatacataaaagacaaataaataaatctaaaaaaaaaaa

SEQ ID NO: 860 - DNA, 100 bp, Mus musculus
  misc_feature (1)...(100): n = A,T,C or G
tactggaccagtagattattcggcggggaatcnggntcccctcccccttcctttcataactgagtgtngcgaacagngaaatnggagctttgatcagaac

SEQ ID NO: 861 - DNA, 307 bp, Mus musculus
  misc_feature (1)...(307): n = A,T,C or G
aaccgacactgagttgggacattggtatgtggggncacccangtctgggttnccgntcctggncncccaatnagccctctncggagcgcctnaagctgctgcatgtatgtngccgcacatacatnttntcantggncagcatggcggggcacagntttaagcccagcacttgnnangcagacacaagtggatttctgggagtttgangccancctggnctacacagngagttncaggatggccaggnctgcnnagtgacagaccctgtctcaaantgttctaaanacaggacataacgaaagaaaaa

SEQ ID NO: 862 - DNA, 484 bp, Mus musculus
  misc_feature (1)...(484): n = A,T,C or G
aactgaggcttacaggnggctgcaggaagaagcnnggccacaacnggntacagttgaangagntgggnnccccaaggacatcttaccagtnncagccaaagatntgatctacgtacacctgcgtcatgctgagaccctcaagcctcactaaaagggtccctgcctagttctgtttactaatctgccttattctgttgttgttcccatgttaaagatagagtaaatgcagtattctccacatagagatatagacttctgaaattctaagattagaattacttacaagaagaagtggggaatgaagaatgaaaaattactggcctcttgtgagaacatgaactttcacctcggagcccaccccctcccatctggaaaacatacttgagaaaaaacattttctggaacaaccacagaatgtttcaacaggccagatgtattgccaaacacaggatatgactctttggttgagtaaatttgggggttg

SEQ ID NO: 863 - DNA, 237 bp, Mus musculus
  misc_feature (1)...(237): n = A,T,C or G
agactgaggtcttgtctcagcatgtgggtctgtcacagctgacatcactctgtcaatcaccccaagtccactcaagggacaagaaactgnggcacaccaccagaagtttttttgtttttgttttttgctgtatttctttctattgagtcccgataaatacagctcaactacacaatataagacagaccaatacatgtgtgtccttaataaaaaaaatctttcaccacaaaaaaaaaa

SEQ ID NO: 864 - DNA, 280 bp, Mus musculus
  misc_feature (1)...(280): n = A,T,C or G
cacctgctgctgctcgncnccaagacactgctacctgctgaaaggcccttgagataatctggagacagcatccagccgatcacctactggctggcgaagggcaccaagaatggattgtttggggggggcgggggangaaaggnggaaagcaaaanagcagagnctaagagtgcaagagctctattgcttacatntttaggagccanagcgcanganagcannagagcanncnagancgcangagagagaatggngaaaccccatccctttttaaggagaa

SEQ ID NO: 865 - DNA, 198 bp, Mus musculus
  misc_feature (1)...(198): n = A,T,C or G
ttggtgcctgcagagnaggagacaggataagacagaggagcatgtcggctcccctgagattggagtgtgaggtcggtgtgagtcaccatgtgcttgctccgaactgaacctaggtcctctgcaggagactcttaatccctgagtcatctctccagcttctggcattagtacttttttaatgtgagaaaattaaaaaaa

SEQ ID NO: 866 - DNA, 262 bp, Mus musculus
  misc_feature (1)...(262): n = A,T,C or G
gggctctgccagcactaaggctctcatcngacgtctgctcagctngcagtgtactattttttncattcatgnatantctgaatttattttggnctcttgnaccacttanactangagangaatggntngananncttaggtttnaaccaanaggaagggctgganagatggnctcagcggttaanagcacttgactgntcctntnaaggtcctgagttcaagncccaggaaccacatggtggctcacagccacgcgtactga

SEQ ID NO: 867 - DNA, 245 bp, Mus musculus
  misc_feature (1)...(245): n = A,T,C or G
caactgagatctgcanaggaggggacgaaaacgaaagacatggtgaaggtggcatgaacctgtggtccagctacccatgctgattgggcccaggagttcgagaggtcctgagcaattcctagnaacaacatggnggctnacaaccatctgtaatggnatccgatgccctcttctggngtgtctgaaaacagctacagtgtactcctataaatgaaataaataaataaatctctgaaaaaaaaaaa

SEQ ID NO: 868 - DNA, 249 bp, Mus musculus
gactgaggttatataaacagtaagaactgctgaggagacagactagcctgctgcctggaagagactcagacctgcctgaaggagagattctctgtcctgttgagctctccacaagtagtgtaatgaactccagggttcctgctcttggtgatgtagctatatttgagttgaccctgcccctgcccttgcccttttacttatattcttgtgaataactctaataaactcattggattaccaaaaaaaaaa

SEQ ID NO: 869 - DNA, 394 bp, Mus musculus
  misc_feature (1)...(394): n = A,T,C or G
ttctgcaacctgagaatagtctagtggccctctctgtccctgctgaagatgacacctgtaagcatttgctccgagctctgnggtggggtcctcctccccctgctattgtctgtagagaatgtaccaaacctagcaaccaatctcatcagggtctgggtgctaagggctggtgctggcacacccttcacacattcatagcttagggagaagttaaacactgttagccagcagnggnggcacacaccggtaaccccagcattaggaagggtgaggcgggcagatctctgtgagttcaagtccagcctggtctacagagtgagttctacagagtgagttccaagacagccaggcctacacagagaaacctcatcttgaaaagcccaaaagaaaaaaa

SEQ ID NO: 870 - DNA, 558 bp, Mus musculus
  misc_feature (1)...(558): n = A,T,C or G
gactgagttgccatgggcgccacggctntattctcccagncccnaagaactgancccttngaaaccntgaggaanatancanctgttnttggtnangcggnanggtcacccaggcgctactggntttnaanncatgaaggantttancataacagcngaggcttgtcactgttagannccatngaaggccantgnngaaagngcagcctcnnntgcaatagantggcccaggactgaaggggtcatgcactgntttgggagatgccantaccatgagatgaccaccaagagcagcagcancngtggagtacaggcatctggagcctagaggatgatgcttgtgctacaaagggcatggctggagaagtgacccaagcccttggaggagcccagaagatcgtaagttgggatcccagacatttggacggttggagattgacttttgcttttgattgggactgtgccctgatatttttcccctcttgaaaggaagaaaactgttttagtgggagcccacagttaagaaacttttaatttgnaaaaaagacttttggattt

SEQ ID NO: 871 - DNA, 469 bp, Mus musculus
  misc_feature (1)...(469): n = A,T,C or G
gggtttctctgcacaaccctgggtatcctggaactcactgttaaccaggctgaccttgaactcacagagctccacctgcctctgtgagtacctagctcacttctggtttcaatgatgccaaggacaataccaacctaggcttaacttgtcacccgtggnttacacagacttcaaccaatcctccttgnttcccgaagtgaagaagatcctttaagagggatggcaactcaatnnagtaatacagttagcctgcagcattgtaagaaaaccatgggctggaganatggttcagnggntaagaacactgactgctcttccagangtcctgagttcactttcccagcnaccacatgggggctcacaaccatctgcaatgggatctgatgccttcttctggtgnggctgaagacagcaacagtgtactcacatacataaaatcaataatanataaatcctttttaagaaagaa

SEQ ID NO: 872 - DNA, 480 bp, Mus musculus
  misc_feature (1)...(480): n = A,T,C or G
tgaggtgttttggctgngtgtatgtctgtgcaccatatgcatgcctgatgcctgtggagaccagaaggcggcaccggnngngntggaactggagttacagacagttgtgagccatcatacgggtgctggaaactgaacccaggtcctctaaatagaagacagtgctcttaagccatctctccagcccttgttttgttgagagaggtttgtaatatctagtccaagtaggcttcaaacttgagacgctcctgcttcagaaccagtgctggaattacagcaacaaagccccgggagcgctcctccagcctctcacagaaccagccatctcctagacccttacacaactacctacttgtccttctcacttcacagaagagatttctggcagaagactataaacaacgaagaaaaagagttgaaaagctgtggctgtacaccactccaaaacagagaacgccctagggcaaccagactcttacc

SEQ ID NO: 873 - DNA, 192 bp, Mus musculus
  misc_feature (1)...(192): n = A,T,C or G
tcccttgtcctctttccttctgctctggagtccagcgctgaccccgtgatagaactgaggngctgaaatcaccccgtgtctgcagagttgagcattgctacagctctgctggagaaagagagagaggagagagagagagagagagagagagagagaggagagagaagagagagaagagagagaagaagagag

SEQ ID NO: 874 - DNA, 295 bp, Mus musculus
  misc_feature (1)...(295): n = A,T,C or G
tgaggtttcgaactccgcactgattagnagggacattcacaggagaaaaacacccagacaactagaactcagaaaagtgaagacccaaaggaactccggcatctacagggcacttgatgtcgtgtcccttaaaatgtaagaagccggctaggcatggtggcgcacgcctttaatcccagcactcaggaggcagaggcaggtagatttctgagttcgaggccagcctggtctacaaagtgagttccaggacagccagggctatacagagaaaccctgtctgtctcaaaaaaaaaaa

SEQ ID NO: 875 - DNA, 100 bp, Mus musculus
  misc_feature (1)...(100): n = A,T,C or G
cacccccgactcctgctcccaaaggacattcctgtacccgnagcgactagctcaccccctgggatntcccaccagnggcccagggacagtggggggcaga

SEQ ID NO: 876 - DNA, 384 bp, Mus musculus
gactgaggtacagtcttcctccgagtagcgaatctttggagaaagagacaagaggctgtgtgcatgagcaagcaccaccgtggaccgtcccagcggtaaccagcagagtgcttcttctatcaaccgcctttaagcacacagaaatcaaggcatggctgagctcgactaccatcccactccttgagaggtggaggcaagaaatccagagttgaagagcagctggggctacatgagattgttggctcatcccagaagtattcagcaactttctcttgagacagattcttaccatatgtagccctggctggcctagaactcaaagatccacctgcttctgtcaccaaatgcagggattaaaggcatctataaccatgaaaaaaaaaa

SEQ ID NO: 877 - DNA, 241 bp, Mus musculus
  misc_feature (1)...(241): n = A,T,C or G
gactgaggattaattaggatgactttcaggctgcggntcagataatccaaaaatggctccaacggggttggagagatggctcaggagttaagagcactggctgctcttccagaggtcctgagttcaaatcccagcaaccacatggtggctcacaaccatctgtaaagggatctggtgtttntgaagacagctacagngctacagtgtactcatataaataaaataaataaattttaaaaaa

SEQ ID NO: 878 - DNA, 140 bp, Mus musculus
  misc_feature (1)...(140): n = A,T,C or G
gcagttgtctacagaaggccagcannaacagcgacagcanccccctgntaactgaatgactgntacatgcccgtgcagatactgggaactgaaccctggtcctctgcaagagcaacccatgttctcagtcactgaactaa

SEQ ID NO: 879 - DNA, 161 bp, Mus musculus
tctttccttctgatctggagtccggcgctgaccccgtgatagaactgaggagctgaaatcaccccgtgtctgcagagttgagcatagctacagcctctgctggaaaaagaagagagagaagaagaaaattgagaagaagaagatgaagaagaagaagaaga

SEQ ID NO: 880 - DNA, 290 bp, Mus musculus
  misc_feature (1)...(290): n = A,T,C or G
tcagctggctttcttacagcatccaggaccagcagcccaggggtgacagagtgagctggtgccacagagagctgggccctcccacttcaatcatcaatcaagaatggagaacaggggcctggagagatggctcagcnggttaagagnggtgaccgctcttctgaaggtcctgagttcaaaccccagcaancacatggtggctcacaccatctgtcatgagatctgataccctcttntgnggtgtcngaagacagcttcagtgtacttacntatnaataaatgttaaaaga

SEQ ID NO: 881 - DNA, 345 bp, Mus musculus
  misc_feature (1)...(345): n = A,T,C or G
aactgagtactcccctcccccatcctgnaanctgcttgctcaagggnngancttcctgctnatnccttctgncacncccactgggggaggnngnggagccacacactatgcacctttctactggaccagcagattattcancttacaatntggntnccntnccccttccttcataactnaangtcgcaacaataaaattgaagctttgatcaganaaaaactaatanatattgcttncatgttggggnggggcaggatntggcnccaaaangtgcaaggaaatgggcatcactcgccctgcacattaaactccnggccacaggaggaacaggaccaagaccccct

SEQ ID NO: 882 - DNA, 171 bp, Mus musculus
  misc_feature (1)...(171): n = A,T,C or G
gtttatccctgtcatctttccttctgctctggagtccatcgctgaccccgtgatagaactgaggggctgggntcaccccgtgtctgcagagttgagcattgctacagctctgctggaggaagagagagaggagagagagagagagagagagagagagaggagagagaatca

SEQ ID NO: 883 - DNA, 135 bp, Mus musculus
  misc_feature (1)...(135): n = A,T,C or G
gaactgaggagctgaaatcaccccgtgtctgcanagttgagcattgctacagctctgctggaaagagaagagagagaatganganactggagaagaagaagatgaagaagaagaagaagaagaagaagaaaaaaa

SEQ ID NO: 884 - DNA, 234 bp, Mus musculus
agtttatccactgtcatctttccttctgctctggagtccagcgctgaccccgtgatagaactgaggagctgaaatcaccccgcgtctgcagagttgagcattgctacagctctgctggagaaagagagagaggagagagagagagagagagagagagagaggagagagaagagagagaagagagagaagaagagagagagaagagagagagaggagagagagaggagagagaga

SEQ ID NO: 885 - DNA, 329 bp, Mus musculus
  misc_feature (1)...(329): n = A,T,C or G
ccacttgcgtgattccccacntgtacctaaagtgaactatctttgaagtgtttgcaagtggatcgagcctgccgctgtgaacctgagaactcacatgtgaactgaactgccgatttccagacaacacnggatgangagttgctccaggaaacctctctgaacaggtccacttccccctgtatcctttctttcccactacctctggtgggtagtgggctaaaagggaggttaaagtatttaagaaccatcagtaacaatagggtttgaagaaattaaagttacagatatttttttttaagtttncacctaaaggaaacttcccagaataa

SEQ ID NO: 886 - DNA, 228 bp, Mus musculus
  misc_feature (1)...(228): n = A,T,C or G
gattcctcaggattgaactacagcttcctggtgtctgcttgctgaaggacttgaactgtagnngntgggntcatgcctggtgtctgcctgcctacagnactggnctgcatctgctgagtcgcgcttggtgattgntatagctctgaactgctgccnaagaaggncaagnncgacccaaanaaccatcgctnaacaggtcnacttnctccagatcctactggatggtgg

SEQ ID NO: 887 - DNA, 272 bp, Mus musculus
  misc_feature (1)...(272): n = A,T,C or G
tcttgcagcccctaggngctggggacacccgcncacacagctatctagattggcagtggaagtcacttccatgttcaanaaggncntattcctcagaaaactagatattaaagagcctgcangaacagnntctctgagctggtgagatggcctcagcaggtantgagcactgnnnggncttccgaaggtcctgagttcaantcccagcaaccacatggngnctcaaaaccacccgtaatgagatctgacntcctcttctgatgagtctgaag

SEQ ID NO: 888 - DNA, 273 bp, Mus musculus
ttgccttgtctcccatggccttgctcagctggctttcttacagcatccaggaccagcagcccaggggtgacagagtgagcctggtgccacagagagctgggccctcccacttcaatcatcaatcaagaatggagaacaggggcctggagagatggctcagccggttaagagcactgaccgctcttctgaaggtcctgagttcaaaccccagcaaccacatggtggctcacaccatctgtcatgggatctgataccctcttctggggtgtctct

SEQ ID NO: 889 - DNA, 227 bp, Mus musculus
tgaggtgctggtcctcgggtccgaagtgcctcatgatactggatcgattggcgaaaagctaagtaaggtgtattccgatactatctattaattgatgacccactacttcggtgtggtggcacaggcctttaaccccagcactcaggaggcctctgagtgccacagagaggcaagtggccagcctggtctacagagcaagtttccggacagcctgggaaaaaaaaaaa

SEQ ID NO: 890 - DNA, 164 bp, Mus musculus
  misc_feature (1)...(164): n = A,T,C or G
taatctgacattagaggagttagnatcnagaactgnntcctgantncaaccacatgtaccagtcagtgagtcaccctgtgtggtggtttaaatacgcttggcccagggagtggcactgttaggaggtgtggctttgttggagtgggtgtggccttgatggagta

SEQ ID NO: 891 - DNA, 230 bp, Mus musculus
agggcagcaacaggataaccgggaggagttcaacattgatgtcatagaagccagatatctcgaaccagaccaatgactcatcgcaatgaacctttgcaagatgtgtggacaaagggctatgctgtgggacacactgtgacacactacagcagtccatgatgaggtgtcttctatgctgtttttgttctttgtttgcacgtgtgcttcctgggggtgggggtggggggaag

SEQ ID NO: 892 - DNA, 414 bp, Mus musculus
  misc_feature (1)...(414): n = A,T,C or G
gtttgggaacctctggaagctgagaccangaaggatgaccacngtcgnggccagactggacaacaaactgagaccctgtctcaacaaagaaacaccagcctgatgccaatgcctggcaaatacagaagnccatgctgactgtcatctattggatggaacacagggcccccattgaaggagctagagaaagtacccaaggagctgaaggggtctgcagccctataggaggaacagctatatgaactaaccagtacccccagagattgtgtctctagctgcatatgtagcaaaggatggcttagttggccatcaatgggaggagaggcccttggtcttgtgaagattctatgccccagtataggggaatgccagggccaggaagcgggagtgggtggattggggagcagggggagg

SEQ ID NO: 893 - DNA, 129 bp, Mus musculus
  misc_feature (1)...(129): n = A,T,C or G
ggagccacacactgtgcacctttntactggaccagagattattccggccgggaattggnttcnntnccnnttgcttcataactgagngtggcaacagtgaaattggagctttgatcagaataaaaaaaa

SEQ ID NO: 894 - DNA, 447 bp, Mus musculus
  misc_feature (1)...(447): n = A,T,C or G
gcctttgatctttcataccatgctcctttatctgttctntgctttccatgatatagggagctgttcatagatctcatttccttatgtagggatggaatatggggaanngggaaccaaaagaacaaaagncaattnacacactggtcctatcngggnggnnagtctataaacattttcantgttttaatatataaaaccagattatangctgctcattagaaacattcttgaagcanagacacnggtcattctannggacncaagagatnancntgcaaacgccnatcgnggactgactgtgttttcatgctttcggaacacatncacattcaggcaggcagagaccctgcatagagtgntggtttcagtagtacgaaggaagaattcngcganctatgagttcnaggccanccttgtctacaaagtgagnnccaggacagccagact

SEQ ID NO: 895 - DNA, 438 bp, Mus musculus
  misc_feature (1)...(438): n = A,T,C or G
gactgaggtgtatgagtcttttgcctgcatgatgtctgtgcaccatgtgaatgcantgcctatggagtccagaaagggtgtgcagatctcctggaactgangntacagatncgagctgtcatgtggntgctgananttgaacccaggtcctctggaanagcagtnaganacccccanatcantgaggcatctcttcagaatcttccttatctgctttttacatagctctggggggggttngaaccnagagctccctgcatgctaaccaagcnctctaccaaacaaactacaaccccattcctcaaaagaagataaaatgtatcacactgtcctngtaagcactcaccaagnntncngnnngncgncncatggntccagagncctgtncatgtttactcttgagacatacacacagcaattctcaaacaattctgaaag

SEQ ID NO: 896 - DNA, 253 bp, Mus musculus
  misc_feature (1)...(253): n = A,T,C or G
aaactcacagggatccgccngctggagagatggctcagaggtccagagcacttgcagaggacctgtgttccattcccagcacttacgtgagggcttttgaccatcccgacaccagctgcacgggatccggtccacaggcagcaggtatgcatgnggnggacanaatncacagggggggggggcggacttccacanngccttcttctgacccacccaccaccacnaccaagaagaaagactttaagaaaaaccg

SEQ ID NO: 897 - DNA, 352 bp, Mus musculus
  misc_feature (1)...(352): n = A,T,C or G
tgagggttccagactgccctttggtattcaaacgggagccgctttggactgactggctgccttcctcctcctccccctcctcccccttctgcttcagatttatttattatatgtaagtacactgtagcagttgtaggacacactagacgagggcaccagatctcattgtgggtggttgngaaccacccaccatgtggtngctgngatttgaactcacnatcttcanaagagcagtcnnggntctaaacngntganccatctctccagngtccngcnttccttgttaangcatgaatgatcccagcatggnacgacagnctgncctacntcctttatgagccattttccctct

SEQ ID NO: 898 - DNA, 187 bp, Mus musculus
aggcctgaagaggacatcagatttcttggaactgaagtcacacaaattgtaagctactatgtgtgtgctagaaattgacctgagtcccatggaagaacaactggtgctcttaaacactaagccatctctccagcccccactgaagattttttttaacacaatggaaacatgagccttatttgttagg

SEQ ID NO: 899 - DNA, 412 bp, Mus musculus
  misc_feature (1)...(412): n = A,T,C or G
gcatgggatgaaggctgaggttttgcacgtncgctgccgtcgcatanggnactctcttnacttctgggtnattcctcttcanttgcntaagtttcagctgacgctgnagaatgtctccggagcatggagtctaggcttcagcatccaagtggngaagtnacacagntgnagcctcccccagccttgngtaggctggctttgaccttgctgccnctgagaatcanaccacctgggatgnagccttnccacttagatggctntattgttcnggcncgtgctgntgntctccaagacactgctacctgctgagaggccctggagatattccggagacagcnacccgcagatcacctactgncaggcnncaggcatnaacaatggattggcggggggangggcctcccccctttat

SEQ ID NO: 900 - DNA, 416 bp, Mus musculus
gaactggtcacctactgtaaccagacaggacttcctgtgaagagagaggggcatcaacccacccacaaaaccttcaacccaaaatgtgttctgcctacaagatacacagggataaagatggagcagagattgaggggacggccaaccagtgactgcctaactcgagacccatcccatgggagagagccaacccctgccactattgacactcggctatgcttgcagacagtgtgactccttgacaacagtgtgcctcgttatggttttatgaaaccagttaacagtcttcctccaaggtctctgcttcagtccctgcctccaggaaatgccctgcttgtgtttctgctctgacttcccccagtgatggaatgttaccatggaagataaaataaatctttcccacatcaaaaaaaaaa

SEQ ID NO: 901 - DNA, 175 bp, Mus musculus
  misc_feature (1)...(175): n = A,T,C or G
ggagcttcctgctcatttgttctggcacgcccactgntggaacctggggagccacacactgtgcacctttctactggaccagagattattcggccgggaatctgggttccntcccncttgcttcataactgagtgtggcancagtgaaattggagctttgatcagaaaaaaaaaa

SEQ ID NO: 902 - DNA, 216 bp, Mus musculus
  misc_feature (1)...(216): n = A,T,C or G
tgagtctcccctcccccagcctgaaacctgcttgctcaggggtggagcttcctgctcatttgttctgccacgcccactggnggaacctgnggagccacacactgtgcacctttctactggaccagagattattcggccgggaatctgggtnccntcccccttcnttcataactgagngtggnancagtaaaattggagctttgatcaaaaaaaaaa

SEQ ID NO: 903 - DNA, 155 bp, Mus musculus
  misc_feature (1)...(155): n = A,T,C or G
ctgccacgcccactggnggaaccngnggagccacacactgtgcacctttctactggaccagagattattccngccgggaatctggntnccntcccccttgcttcataactgagngtngcaccagtgaaattggagctttgatcagaaaaaaaaaa

SEQ ID NO: 904 - DNA, 167 bp, Mus musculus
  misc_feature (1)...(167): n = A,T,C or G
aggagcttctctgctcntnngtgctgccacgcccactgctggancctgggnanncacacactgtgcaccttnctactggaccaggagattattcccgccggnaattggctncnntccccnttgcttcataactganngtngcaacagtaaaattggagctttgatca

SEQ ID NO: 905 - DNA, 175 bp, Mus musculus
  misc_feature (1)...(175): n = A,T,C or G
ggagcttcctgctcattngtnctgccacgcccactgnnggaacctgnngagccacacactgtgcaccttnntactggaccagagattattccggccggcaattggnttcnntnccncttgcttcataactganngtggcaacagtgaaattggagctttgatcagaaaaaaaaaa

SEQ ID NO: 906 - DNA, 214 bp, Mus musculus
  misc_feature (1)...(214): n = A,T,C or G
ctgccctcccccatgctgaancctgcttgctcaggggtggagcttcctgcncntttgttctgccacngcccactggnggaacctgnggagccacacactgtgcacctttctactggaccagagattattcccccggnaatctgggtncnntnccncttncttcataactgagtgtngcaacagtgaaattggagctttgatcagaaaaaaaaaa

SEQ ID NO: 907 - DNA, 180 bp, Mus musculus
  misc_feature (1)...(180): n = A,T,C or G
gggtggagcttcctgctnattagttctgncacgcccactgngggaacctggggagccacacactgtgcacctttactactggaccagagattattcggccgggaatctggnttccntnccccttncttcataactgagngtngcaacagtgaaattggagctttgatcagaaaaaaaaaa

SEQ ID NO: 908 - DNA, 264 bp, Mus musculus
  misc_feature (1)...(264): n = A,T,C or G
cgcatatggctctgaggaaattttaatatattctggaagctctaaagaaaagcantgagtgccgggcagtnnnggaggacacctttaatcccagcacttgggaggaagaagcaacacaggtaaaccttaaactttatgttccttntaaaaagacatgggtgattaaaatgaaggattnctgagttcaaaaccaggctggtctacacagtgagttccaggacaaccagggggtcacagagaaacccctgtctcaaaaagaaaaaa

SEQ ID NO: 909 - DNA, 381 bp, Mus musculus
  misc_feature (1)...(381): n = A,T,C or G
tgcatgccgtgaacctactttgtanaccagactggcctcaaactcagaagtccagnctgcctctgccttccaagtgctgggattaaaggtgtgcatcaccactgcccggccacactggaccttttgaaccctgaggtctccccaagancagattccgattggccattagcaggtttcatccatgagcgttggacactggagaaaaggaatctcttgccaagcatgtcttgggtaacatgttacagctgtcatgaaagtttatcaggaaaaaaaatagggcttaagtcttttggataagcagggtgagactgcccaaaaacttctccaaaaacttgcttaaaactcccagaataaaggcatagagaattggaaaaaaaaaaa

SEQ ID NO: 910 - DNA, 256 bp, Mus musculus
  misc_feature (1)...(256): n = A,T,C or G
caggtccaagcgggaattccttcctgtggagcagggcctcaaattcaatcagaaagtgattggttttccccattgccttcaagacactactgtaccagtgaacacatctcatctgcagacaggatcccacctggtggctggccagtcagcctggaattcactctgaagacccagcaggcctcaaactcaaagcaattcacccatctctccttcccaagtgctgggataaaaggtatgnaccaccattcctgacatc

SEQ ID NO: 911 - DNA, 331 bp, Mus musculus
  misc_feature (1)...(331): n = A,T,C or G
gggcatctccctgtgaatctctaggcacagctcagctgcacatgaatcttaagcaaggtttgantccagatgcagaatgctactctaaagtgcctaagctnttcatggccactatgcctcaagatctccatgccaagatccacgtcagactctctaaccccatctctgactggcaacccatctcagtcctgtgctgggaaggcaggagtntgtagatagctcccttctggaatcagatcccgggggcttccctggtgatcagacagctttctcacttacgtggctctgcagacatcatatggctttttggaggagtccatcaaaaaaaaaa

SEQ ID NO: 912 - DNA, 209 bp, Mus musculus
  misc_feature (1)...(209): n = A,T,C or G
ctggcttgaagcttaatggnttcagtcctgcctttgnatccccccctccccctccccctgagacaggatttctctatgtagccntggttgttntggaacttgctctgtagacctatagaccaggctggcctcaaactcacagagatctgcctgcctctgcctnctgagtgctgggattaaagangnagcaccacctccaaaaaaagaaa

SEQ ID NO: 913 - DNA, 403 bp, Mus musculus
tgaggtggggtctttcaccatgggtatgatcaccaagaacagcagcagcagcaggagagtgcatcaacctgagcttagagtgctacagagggcagagctggaggagctcattggaggagatcatgtgtggatcccagacattgaaacaagaagctgtaacattgaggttgccttggagaccccaagatgttcaagataccagagctgtaggctatctgctaacagggagtggaaccagctcagcagaaagacgtttgttgcagtcaacaaagatcaaaagggagttggagatctgaagattactttgacatcagacatggagatgcagagtttggagtttgcccagctgatttcctgtcttgtttttggggattacagtaaagtgattggatggctctcagaa

SEQ ID NO: 914 - DNA, 333 bp, Mus musculus
  misc_feature (1)...(333): n = A,T,C or G
gtagagtccatgatggtaaagcaagggaacagctgagtgtaacctnccccagcctgaagctggccgagccagacctcgactttgctgccactaaggagattacctaagatggagcctccctagatcactctattgntcagccactgttgctgttcttcttcaagatactgctacctgctggaaggctgccgaactattccagagaccacaccctatcctgcatgtggtcacctgcagctgggctccaaggatgaattggctggaatgggcctccctctcctttataagcgcattcgccattaaacatttgagccttgaacggaaaaaaaaaaa

SEQ ID NO: 915 - DNA, 324 bp, Mus musculus
  misc_feature (1)...(324): n = A,T,C or G
gtctaggaacttactgtactgtggaatactctttaaaactatactttggaaggtatctctgatggaaatgatgagaaaactaacttcantttctgctgtttgaagagtgggtgcctgtgagattggagcgcttggacaaagtggctcctcctgccggccagcccttcggaaccacctgatacttgactgtgtatgaaatacttcagtnttgctttaaatactggcagcaagtgctagcgttcggggttggggatttagctcagtggtagagcgcttgcctagcaagcgcaaggccctgggttcggacctcagctctggaaaaaa

SEQ ID NO: 916 - DNA, 207 bp, Mus musculus
  misc_feature (1)...(207): n = A,T,C or G
agactgaggcttggtgcctgcagannaggagacagagaagacagaggagcatgtcggctcccctgagattggagtgtgaggtcgttgtgagtcaccatgtgcttgctccgaactgaacctaggtcctctgcaggagactcttaattcctgagtcatctctccagcttctggcattagtacttttttaatgtgagaaaattaaaaaaa

SEQ ID NO: 917 - DNA, 453 bp, Mus musculus
  misc_feature (1)...(453): n = A,T,C or G
catgggactcactcagaggctcctgctcactgacagatgaagacaaacccacggtaaaggatagccagcgctacacagagaaaccctgcctcaaaacaaataaacaacaacaaaatacaccaccaccaccaccccaaagaaaagaagaaagaagagaagagacaaggaggaaaccctgagaagaaaagcagttcccttcccgtcagctgcagtgagggcgctgcagccagccgtggctgcgggctggaagattgtctcctgcatgcctggtatccacggagggctgaaacaggaggatcccctgaaagtggagttacagacatttgcaaaccaccgtgtgcctgctgggaaccaaaccccggtcggtcgtctgaagnggcagctcatgttcttcaccataaagccatctctctaaccctgatgtctactccttagaatttttttttttttttt

SEQ ID NO: 918 - DNA, 442 bp, Mus musculus
gaactgagatgctgctgagagttgagtatccacagatgcctgtcccctctgctatggagtgacctgccaccatgacttctctgccgccgtgaaggagtgtatccctaagactgtgagccaaaggaaccctgcgtccttgggttgcctctcgtcagcctcccccagccttgaagcaggctgatcagaatttgaccttgctgccactgagaatgagaccacctggggtggagccttccaacttagatggctctattgttctgtctgctcttctccaaaattctgctacctgctgagaggcccttgagatattccagagacagcatccagcagatccacctacacgctggcaacaggcatcaagaatggattggcagggaatgggcctcccccctttataagcacagactcttagtaaacttgggggccttgaacagaaaaaaaa

SEQ ID NO: 919 - DNA, 259 bp, Mus musculus
  misc_feature (1)...(259): n = A,T,C or G
gacgtctggggagctcctgcattaagtcagactgaggttatctttagctgcaatgaaaagtccaatcaagggctggngacatggctcagtgggtaagagcacccgactgctcttncgaaggtccataagttcaaatcccagcaaccacatggtggctcacaaccatccgtaatgagatctgacgccctcttctggagtgtctgaagacagctacagtgtacttacatataatcaaaataaataaatctaaaaaaaaaaa

SEQ ID NO: 920 - DNA, 284 bp, Mus musculus
  misc_feature (1)...(284): n = A,T,C or G
gacgtctggggagctcctgcattaagtcagactgaggggccctctatttagaaagaaagaaagagagaagagaagagaagagaagagaagagaagagaagagaagagnagagaagagaagagaagagaagagaagaatccagacattgatggtgatggtgcacatgtttagtatcagcactctcggaggcagagacaaaaagatctttgagtgcaagactagcctggtctacaaagcaagttccagaactaaacagagaaaccctgccttgaaaaaaacaaata

SEQ ID NO: 921 - DNA, 221 bp, Mus musculus
  misc_feature (1)...(221): n = A,T,C or G
tgccctttggattcaaacgggagccgctttggactgactggctgccttcctcctcctccccctcctcccccttctgcttnagatttatttattatatgtaagtacactgtagcagttgtaggacacactagacgagggcaccagatctcattgngggtggttgnganccacncancatgnggcngatggagattcagaactgcacgatgttgataaagagc

SEQ ID NO: 922 - DNA, 230 bp, Mus musculus
  misc_feature (1)...(230): n = A,T,C or G
cctcagatcctctctcagaggantnacaagagatnacagcngncttagctncacccctgaacgangncattaagggctgnagaggnggntcagnagtcnntagcatttgactgctcttccaagttcaattaccagcaaccacatcttggcccacaaccatctgtaattggattccgatgatgccctcttcagtgtactcacatatagacaataaactttaaaaaaaaaaa

SEQ ID NO: 923 - DNA, 198 bp, Mus musculus
ctgacctgtcttctgagaaattcctgagatagcggacaacctgtggacttggcgacctaatgctaacagctctgacagactagtgctaacaacttagcaacaaagcatcaagaagcctggggtggcaggggatgggcctcccccctttataagagcagactcttagtaaactttgggccatgattggaaaaaaaaaaa

SEQ ID NO: 924 - DNA, 411 bp, Mus musculus
  misc_feature (1)...(411): n = A,T,C or G
attaacgcagccggcattgggccagnagggtacatgcatctcctcatgattccacattcaaggccangtctgtcaatgaattatttctacaaaggaccatgtaggcttttatggcctctgtggttatgtagcctagatccttccccatggccaagcggagggcctgctcctcgtcctccacagcctcatgaccacctccgttcctcattcctaagaactgtatcaggctggtgagatggcttagtgggtaagagcacccgactgctcttccgaagttcaaatcccagcaaccacatggtggctcacaaccacccgtaatgagatctgatgccctcttctgnagctgtctgaagacagctacagngtacttacatataataaataaataaataaataaataaataaatctta

SEQ ID NO: 925 - DNA, 193 bp, Mus musculus
gactgaggtttttggcaccttgacccaggtagtagttatttggggagaagctcaactgagaaagtgcctccatcagagtggccttgggcagtttctgcctccaggttcctgctttgagttcctgcccgacttcccctgaggatggacctgcgatccaaataaataaacaaattatccaccccaaaaaaaaaaa

SEQ ID NO: 926 - DNA, 322 bp, Mus musculus
  misc_feature (1)...(322): n = A,T,C or G
gactgagaccgggtttcgctgtgtagccttggttgtcctggactnactctgtagaccaggaaatctgcctgcccctgcctcccatgtgctggaattaaaggcctgcaccaccactgtcnggcancttattttatcttaagaatttcatgnagnggggctggagagatggctcagnagttaagagcactgactgctcttatgaaggtcccgagttaagaccccatggtggctcacaancatccataacangatgtgacaccctcttctggagtgtctaaaaacagctacagtgtacatgtatttacatataataaataaataa

SEQ ID NO: 927 - DNA, 185 bp, Mus musculus
  misc_feature (1)...(185): n = A,T,C or G
gaactgagaggaagtgaacactcanacccatagtcaagctttatggcagaagactctggtaaggatggagacaacgtctgtaagaaaactactgcagatgaagggttggccaatggtggcttgctggacaaacctggcctgctttctgtttttgtcaataaagttttattagaacacaaaaaaaa

SEQ ID NO: 928 - DNA, 363 bp, Mus musculus
  misc_feature (1)...(363): n = A,T,C or G
gactgaggtgatttcttacctnagnttgacctggtgcatnntcatgcnntntaacagtgactnngacagatctgaagtatctcctgaaggctcatgtattcttacacttggtccccaactggtggtgctcgcttgggaagttgtagaaactactgggactttggactagctagcagaaggaggtcactcgggcacaggcttgtgataacatctggaactggatatgtaagccanttggaacttacagagaccttcctgcttntgnctaccaagtgctgggattaaaggtatgtgccacaacacctgncttgggggacctgacctancaatcaggngataaattctcttgaacaacatgaaaaa

SEQ ID NO: 929 - DNA, 401 bp, Mus musculus
  misc_feature (1)...(401): n = A,T,C or G
atttatgagatccatccnagcgaagaaacctantgtancttnggtctgaccaagcctgcatnctncagctaccaagaggatgctcgcngctcngatatcacacatctntgagcattctggggaaaatgaanctacagccatcacaatgntctagatgggccagaacgatggctaagcaggtaaaggcgcttgccaccaagccggtgacctgagtttgatctctgggaccctcatggtgaaaggagagaaccgactccttcaagtgccctctgacctccacacgtgcactgtggtacgcacatgcctacacacacacacacacacacacacacacacacacacacacacacagattnanaaatntgnanagaaattntataaanatataaaatatatttaaa

SEQ ID NO: 930 - DNA, 436 bp, Mus musculus
  misc_feature (1)...(436): n = A,T,C or G
tgagatgcagacagacatgccgaactttctggaagcccactgaaaagcagaagcaccaggaaacctttgtcgtgtatcattgggtatttagagatccatcccgcagagaaacctaatgtaatnnggtctccaccattgcctgcngactccagctaccangaggattgctccgccgctcngantcacacatgtctgagcattctggggaaaaganactacagccatcacaatggtctanatgggccagaacgatggctangcnggtnnaggcgctgccaccaagccggtgacctgagtttgatctctgggaccctcatggtgaaaggagagaaccgactccttcaagtgccctctgacctccacacgtgcactgtggtacgcacatgcctacacacacacacacacacacacacacacacacacacacacacacaga

SEQ ID NO: 931 - DNA, 135 bp, Mus musculus
  misc_feature (1)...(135): n = A,T,C or G
gatgcaagagccacttggtgctaccacttctgatcatctggatgtntctgcagtgttggggtactactagngtgnctgaagacagctncngngtactcatatcaaatatataantattnaggggaaaaaaaaaaa

SEQ ID NO: 932 - DNA, 307 bp, Mus musculus
  misc_feature (1)...(307): n = A,T,C or G
tctttttttgttataggacagtttgaatgttatgctcagcatgtctgggtcttagttacaaacccttacagaaagaaaagcaacacctcacctgcagttgcaaangtgngtgaatgacaggcaatagagatgcaatgcatcacaagacccacttctgacaggancagccagcgcatcgcagactaaggcctggaactgcctctctctacaaatgtccacaaggttctggctacgatcacacccaatctgtgattaagataaataaataaatacataaataaataacatttcatttatatatcacaaa

SEQ ID NO: 933 - DNA, 174 bp, Mus musculus
cttgaccaaggtagagttatttggggagaagctcaactgagaaagtgcctccatcagagtggccttgggcagtttctgcctccaggttcctgctttgagttcctgcccgacttcccctgaggatggacctgcgatccaaataaataaacaaattatccaccccaaaaaaaaaaa

SEQ ID NO: 934 - DNA, 217 bp, Mus musculus
  misc_feature (1)...(217): n = A,T,C or G
ggggatggccctgctccaggagnaagactcnantatnngcctccncntgcnnctccatcaggaagncgatggacnnncnntnngtaagctggagaaatgtctcagcagttaagagcacttactgctcttggagaggacccagaccagttcccagaagccatatggcagntcacaatcttctatgactctgcttgcngngagaatctgacactgtctt

SEQ ID NO: 935 - DNA, 444 bp, Mus musculus
  misc_feature (1)...(444): n = A,T,C or G
accaggttgcctaaactcccagagacctgcctgcctctgactcctgagcactgggattaaaggcctgcacccccaccacctgactctcaggaatgatgagagctcctaacagcacaccctggaattcccagttcagccgctctcagtgctgcagcctcacaggcaagcagtggtgcatagtgactggttaggttccttcggaagcaagagcctcctggaaggcagacnatgggaggaaggnnatcagagggtacagatnggactagcanaaaganatngaagggaccaaactccaagaataggcactgcngancggagggggtganntggctgggcaggagaataataacaaaatccnacnacaaactccacttgaaaactgcggcatctcnccgcaaatctcccgcnaaggaatccaggcnngangggattaaccgcacttgg

SEQ ID NO: 936 - DNA, 351 bp, Mus musculus
  misc_feature (1)...(351): n = A,T,C or G
gccttgctgtgccgaggacacggagaagnaaatncananaganctcactccccantnctgccttggannttnaccaaggacacccagaagagaagaactctnttnccaactgctcccaacctcttcttgactcctcccaactctnttnttnccaactcctcctaattcctcagctanctgtnaanngccccctactgtcaccactctgggttgaactcccctgccctaatcccatcacttgggaggcagaggcaggcagatctctgagtctgaggttagtttgatctacagagtgagttcctggaagctagggctatacagagaaaccctatccagagaaataaaataaaa

SEQ ID NO: 937 - DNA, 200 bp, Mus musculus; identical to SEQ ID NO: 502

SEQ ID NO: 938 - DNA, 174 bp, Mus musculus
  misc_feature (1)...(174): n = A,T,C or G
gactgagaggaagtgaacactcagtcccatagtcaagctttatggcagaagactctggtaaggatggagacaacgtctgtaagaaaactactgcagatgaagggttggccaanggtggcttgctggacaaacctggcctgctttctgtttttgtcaataaagttttattagaac

SEQ ID NO: 939 - DNA, 159 bp, Mus musculus
  misc_feature (1)...(159): n = A,T,C or G
gtcctggactattgtntaaaccaagctggcctnaaactcacagagattttcttgcctctgcctcctaagtgctgggattaaagatgngtgtcacccacccacnaccccccaatccctgagctctnccccagggactggaccaccaaccacagaatacac

SEQ ID NO: 940 - DNA, 560 bp, Mus musculus
  misc_feature (1)...(560): n = A,T,C or G
gactgagaatttaaaaagaaggaggaggaggaggaggagacaacaacaacaaaaacaacaacaacaacaacaacaactatcttatgttcaagtgcttaaggnggctggatcttccatcccgacttcctctgcaactcatttctcatgcatttcacattaaagtattcacaggagacctggtcagagataggaaacggaggtagcatttacagtcagttcgaggtgtggctgctacatatccctgctgggtgtaggactgaccccccaggaacgctcttctgactcagcaacagactccgagattccgagatctcagcagcacctgtgccgaagcacacgcacgcaggaatgtgtctgcacagaggaggaacacgtgttgacatacatggaaccaggagctaatctatggaaactcttcccaccaccctgtgtacaaagtcataagcgggagacgccatgtttcatccatactatttaaaacagaaattctctcctatagggattgtgctcagcaaagaaacatctacaattacgtcaaataaatataaatactttttaca

SEQ ID NO: 941 - DNA, 207 bp, Mus musculus
gactgaggagagagccagtgaaggcccagtgtccatgtggaggtcacagatgacagacaacttctggaaatcggttttctccttccactatgtttaccttgaaattcaaactcaagttgtccgctttggcagctggcacttctaccacagagccacgtctcagttcctccaagtcccctaacactgagaagaagaagaaaaacaaaa

SEQ ID NO: 942 - DNA, 120 bp, Mus musculus
  misc_feature (1)...(120): n = A,T,C or G
cacgacgcacctttatactggaccagagattatnnggccgggaanangggtcccctcccccttgcttcataactgagtgtccgcaacagtaaaattggagctttgatcagaaaaaaaaaa

SEQ ID NO: 943 - DNA, 199 bp, Mus musculus
  misc_feature (1)...(199): n = A,T,C or G
ctgaaacctgcttgctcangggtggagcttcctgctnattngttctggcacgcccactgctggaacctgnggagccacacactgtgcacctttctactggaccagagattattcggccgggaatctgggtnccntcccncttncttcataactgagtgtngcaacagtgaaattgggagctttgatcagaaaaaaaaaa

SEQ ID NO: 944 - DNA, 179 bp, Mus musculus
  misc_feature (1)...(179): n = A,T,C or G
gggtggagcttcctgctnattagtnctggcacgcccactgctggaacctgnggagccacacactgtgcacctttctactggaccagagattattccggccggnaatnggntncnntcccncttgcttcataactgagtgtggcaacagtgaaattggagctttgatcagaaaaaaaaaa

SEQ ID NO: 945 - DNA, 297 bp, Mus musculus
ttattgtccaattgagaggatctgaggctggttatccaaagctgcctggaaatgcagtctgggtgtgtgtggcagtctgaatatgctcggcccagggagcgaagtgtgtcactgtggctgtggacaatgagaccctcatcctaactatgtgggagctagtcttcttctagtggccttcagatgaagatggagaacgcctgcctggatgctgccatgttcccgccttgatgataatgcactgaacctctgaacctgtcgccagccccaattaaacgttgtcctttataaagaaaaaaa

SEQ ID NO: 946 - DNA, 353 bp, Mus musculus
  misc_feature (1)...(353): n = A,T,C or G
tgcccagccttgcctgctccttcaatgcgttcgggggccgctgctaagtaaaaagtcttcatagagggtttggattacaggtgtataccaccacaccanctcatgngatnatgganataaaactcanggctttggggctggngagatggctcancggnaagagcnctgactgctcttntganggtnctgagntcaaatcccnccnnccacatggtggntcacaaccncccgtaatganatctggtgccctcctctggagagtntgaagncagctacagcngtacttacatatnatnatagatctgtctttanaaancaacaaccacatggnggctnacaaccgcccgggatga

SEQ ID NO: 947 - DNA, 413 bp, Mus musculus
  misc_feature (1)...(413): n = A,T,C or G
ctgagttcaacttgtgataatagcaccattgagagaaacttgcccaagaactgctctcgaggtgcctacggnagnctgctgcttctgcagtcttgcttcaggcctgttggcaagcttggaggtttcttcaggatttacattactgttgctggnttgtgcctaggtgtngcttgctnaaaagactgaactgtagctgctggttcatgngtggngtctgcctgcctgggaggactgctctgcagcngctaattnnnatttantgtnngcttacaggactngaactgctgccanagaagattcaagctcacncccaangaactattgctgaagaagntcgnttcccccatannctaataactnntctttcacnacctctgctaaggggaacgctagaggagaggtggaacccttaa

SEQ ID NO: 948 - DNA, 173 bp, Mus musculus
  misc_feature (1)...(173): n = A,T,C or G
cggcattaaagcctanntctttgggagtccaccatgtactgaagacatccaagcacgtggactgtactggactgttggacttcctgcttacagccagtcattgttggatttgctgggttgcagcctgtaaatcattctaataaatcctgcttacctgcatctaaaaaaaaaaa

SEQ ID NO: 949 - DNA, 131 bp, Mus musculus
ttataagcaaacatcatttaaaaggaaattaatggcgaaaatggggcattgggaaacaatgggggaggggggagactgagagaatgagaatgaataatggcaaaataaataaataaataaataaataaaaa

SEQ ID NO: 950 - DNA, 123 bp, Mus musculus
gagcaccacaactctaacctgtttggctgccttccttcccaaggcacagatctttcccagcatggaaaagcatgtagcagttgtaggacacactagacgagagcaccagatctcattgtgggg

SEQ ID NO: 951 - DNA, 381 bp, Mus musculus
  misc_feature (1)...(381): n = A,T,C or G
tgataaagacctgaagacctgaaccaccttgaagttgtaccagcaaaaacaccagangcatcctctacactttgtacttccagaaccatgagccaaaaatccaccttttaaaaattacttattttatgtgtatgggcgctttgtctgcatgtctgtctaagagtgtctggttgtccagaactgggattacagttgtgagttgccatgtgtgngcngggaattaaaaccaggccttcttgaagcacagccagtgngcttaagtctcagccagtggttctcaacctgtgggtnccaatccttatgtctgggtcaaatgcccctttcatggactgactgtgtgctgtaagctgaaataaaccctttcctcctcaaaaaaaaaaa

SEQ ID NO: 952 - DNA, 187 bp, Mus musculus
  misc_feature (1)...(187): n = A,T,C or G
ttttgaaccaccatgtngntgctgagaattgaacctatgtcctgnggaagatcannnantgctcttaaccnctgagaaatgtntccatcanctattcttgcgntttggttgatnngagctatacagngggggaatcangaaaggctaaaattacaggagctggaagaagagaggaaaaaagaaaaga

SEQ ID NO: 953 - DNA, 172 bp, Mus musculus
  misc_feature (1)...(172): n = A,T,C or G
ttgtggagcatcatgcccaagttttattgngactactgtgataccntatcttacccacgangggggcatctttttatgaanacncacttttnttttttnttnaactcntttanaangttntttactnttnctnttatntttnttttttatttttttttttatttcttatttt

SEQ ID NO: 954 - DNA, 389 bp, Mus musculus
  misc_feature (1)...(389): n = A,T,C or G
gcacctgggaatttgaatcttgaggttttcctgagcttcacaagtttcatatcgccttcctaagtcttaagagcttccctccttcagaaggaaatgtttcaatctgctggtaccaggcctgtgactgcaaaggtgagtgtggatctgggaagagagttaaggcctggagttgtaccgaangaaagaaagaaagaaagaangaaagnangancgngggtggaccgagccntcntacntgagactanagganagaccatncatagactgacccacccgagaattcatnngataatcaaccactanccncannccctattgcatatgccancaagatttttgctgaanggaccctgtntcttgtgaggctgngccagtgcctggcaaataca

SEQ ID NO: 955 - DNA, 343 bp, Mus musculus
cactgggaggttttaaattgaactaaatgtatttctcattatgctatggctagggatggcccccacagactcatgtgtttgaacaaacctatgggggccagtgagtacaatgtggtggtttgaatatgcttggcccagggagtggcactgtgtgaccctgttggacgaagtgtgtcactgttggggtgggcaaagagagcttcctcctagctgcctggggatgccagtctcttctggttgccttcaaatcaagatgcagaactctcagctccttctccagcattatgtctgcctggacactgccatgctttgcttcctgctgtgatgataatggactgaacct

SEQ ID NO: 956 - DNA, 229 bp, Mus musculus
  misc_feature (1)...(229): n = A,T,C or G
ggaaccaactctttcttaacttnataactagtgaaccnacaatggctngagagatgngtnnacgactcaanagnactgactgctgctcttncagaggncctgagttcanttcccancaaccacatggtggttcacaaccatctgtaatgagttccaatgccctcttntggtgtgtctgaagacagcgacataaaatgaataaatctttttaaaaacccaaaaaaaaaaa

SEQ ID NO: 957 - DNA, 371 bp, Mus musculus
gactgagagaacaccaccaaggaacttctggtgatattccgatggctttcttgccacttccgcagactctggcggattggcagagcctcatggtttctttgggattgaactgcctgtagctgattcatgaatggtgtttgcaagtagatggaactacagctgctgattcctgtgaactgaactgctgatgtcctgacagtgcagattggatttgctacaaagaactgcttctaaagaggtccacaccctcctttgccctattaatctctgctttcccctacctccagaggatgatggcctagaagagaggttaaagtgtttaagtacatttattaaagtcagtctggaaaatataagccaacaaactaaaa

SEQ ID NO: 958 - DNA, 237 bp, Mus musculus
  misc_feature (1)...(237): n = A,T,C or G
cctgaacactgtcttgntgaacatattnctgantaaactgnnagcctggcngnctgntatgncctacatgcnncaanagnggaacttggagntttactgctaacggctctggcaggactantgctaacaatgtggcaacaaaacatcaagaagcctggcatggcaggggatgggcttcccccctttataagcacagactgctagtaaacattgagccttgaacagggaaaaaaaaaa

SEQ ID NO: 959 - DNA, 271 bp, Mus musculus
  misc_feature (1)...(271): n = A,T,C or G
cagatggatgtctatgaatttgaagccagcctggtctatgtagagtgttcctcacagtgtctctttgacagagggaagaagaagaggagctattaaagtagcttacaggctatggtccaactantccaacaatggctgtctacaactggaaggtccaagaatccagtagttgntaagtccatgaggttgcaggtctcagctgttcttcagcatacgctggaatcccaaagaagtaggcactantaccagtnaagagtgaatttaccagcag

SEQ ID NO: 960 - DNA, 318 bp, Mus musculus
  misc_feature (1)...(318): n = A,T,C or G
cttgctggccccgtgtgaacatgacatgntgatttcctgacaaagcaaatgggatttactccanagaacaacntgcttaaacaggtccacgttccctggtatcctaataacctttcttttctactcgctctggtggatgatgggctanaaggaagggnggagcatttaagaacctattaaaagagccgggtgtggcggccatgcctttaatcccagcactagggaggcagaggcaggtggatttctgagtttgaggccancctggtgtacagagtgagttccaggacagccagggttatacagagaaaccctgtctca

SEQ ID NO: 961 - DNA, 218 bp, Mus musculus
  misc_feature (1)...(218): n = A,T,C or G
tgtctattaatgaccctggacccacttctggaaccantgatggtatccactaaggatttgtnnctactnagatctactgagatngctnagtgngtangggtgcctgctgttaagcttcacaccttanggtcaatnatcaggccccacatggtggaaggagagaacttctggnctctacatgtgcaccactgcgtatgagctcacacatatatatatgt

SEQ ID NO: 962 - DNA, 303 bp, Mus musculus
tgagggtctcattttgttcctctggctgtcctggaactcattgtataaaccaagctggcctcaaactcacagagattttcttgcctctgcctcctaagtgctgggattaaagatgtgtgtcacccaccccccaccccccaatccctgagctctcccccagggactggaccaccaaccaaagaatacacatggagggaacaggctgcaaatgtgacagaggatgaccttgttgaacatctgatctaaagggaatgggagaagcaaagaaaaacatcctgtgatccctataatggcaaaaaaaaa

SEQ ID NO: 963 - DNA, 179 bp, Mus musculus
  misc_feature (1)...(179): n = A,T,C or G
aggggtggagcttgccgttnaatcgttctgccacgcccactgntggagcttgccgctttgctgttgcnaanccatcacgtgnncacctgcaaccttactcctagattattnggcgggaatcnngnccctccccctttcttcatatcngagtgctggaatatgtaaaaattgaaccttga

SEQ ID NO: 964 - DNA, 222 bp, Mus musculus
aaacaaatggaaagccatgaagacttcctagataactctcatctccaagaattccattcccagcacccatgggaggaggggcttacaacctgcctgtaactccagctccacggaatccagtgccctctcctggcctctgtgggcaattgcacaaccctcgtatacataattaaaaacaagatacagcttttaaaattaaaacttttctgggaaaaaaaaaaa

SEQ ID NO: 965 - DNA, 221 bp, Mus musculus
  misc_feature (1)...(221): n = A,T,C or G
cctgctcttccagaggtcctgagttcaattcccagcaaccacatggtgactcacaaccatctatgagggacccgatgtcctcttctggcctgcaggacangacttttatgcanaaccctgnntatactgtnactnnctctatagaccaggntagatntgaactcagagatctgactgtctctgnctcccgagggctgggaataaaagtggtacatgccacc

SEQ ID NO: 966 - DNA, 121 bp, Mus musculus
attggctttttaaaaaaaagatttatatatttatgtatatgagtattctgcttgcatgcatgcctcttctgtggtgtctgaagacacctacagtgtacttaaataaataaattaaaaaaaa

SEQ ID NO: 967 - DNA, 244 bp, Mus musculus
aactgagtgttttgcctgtgtgtatatatgtacacgtatgtacaccatgtcatgagcctccatggtcgtgagaggactttggatcccttggaactggcgttacattggtcgtgagcctccatgttggcgctgagaagcaaacctgggttctctggaagcgcagcaagtgctcttaaccatcgagccatctctccatctcaaaccacccatgtatataaaatgaaaatacataaaccaaaaaaaa

SEQ ID NO: 968 - DNA, 263 bp, Mus musculus
  misc_feature (1)...(263): n = A,T,C or G
aactgaggttctaggacagaagataaaatattgactgggtttatctatacaaaactccacttatgggctggagagatggctcaatgggtaagagcaccaactgctctaccgaaggtcctgagttcaaattccagcaaccacatggtggcatacaaccatctgtaacgagatctgacgccctcttctggtgtgtctgaagncaactacagtgtacttatgtataataataaataaatctttttaaaaaacttcaaaaaaaaaaa

SEQ ID NO: 969 - DNA, 175 bp, Mus musculus
  misc_feature (1)...(175): n = A,T,C or G
ccttgaccaaggtagagttatttggggagaagctcaactgagaaagtgcctccatcagagtggccttgggcagnttctgcctccaggttcctgctttgagttcctgcccgacttcccctgaggatggacctgcgatccaaataaataaacaaattatccaccccaaaaaaaaaaa

SEQ ID NO: 970 - DNA, 132 bp, Mus musculus
  misc_feature (1)...(132): n = A,T,C or G
aggctctgacagactagngctaacaacttancaacaaagcatcaagaagcctggggtggcaggggatgggcctcccccctttataagagcagactcttagtaaactttgcgccatgattggaaaaaaaaaaa

SEQ ID NO: 971 - DNA, 194 bp, Mus musculus
ttcctcggattcctcctctcaggctggccgggcatcctttccaacagcacaaggggctggcgtggaaggaatcttactgggatctccaagataacacagggtgtttggctttggacctcagacaagagaccagtgaactcgcctgagtatggtttcccaataaacctgcctttaatataatctaaaaaaaaaaa

SEQ ID NO: 972 - DNA, 156 bp, Mus musculus
gacgagaactctcaggttcctgttctggccaccctgagaaagtgtgctgagaaccagaagaaaacaagagctgggtgtaacagcacttgggacgcagtgagttccaggctagcctgatctacatagagaaagcctaccaagagaagaaagaaaaaa

SEQ ID NO: 973 - DNA, 417 bp, Mus musculus
  misc_feature (1)...(417): n = A,T,C or G
ttcgccaggactgaagggaacatgcaaaggagttgaggcttggcaccatgatgagagcctatgagagactattggtaaaacctagttgcagtggaagaccctagtatattggagatgccactaccatggggatgatcaccaagaacagcagcagcaatggagtggatcaacctgagcttagagtgctacagagagcagagctgaagaagtgatgctgaccctttggaggagtccagaagatcatgtttggatcccaggcattagaacaaaaaggtatagtattgaagttgccttgaaggccccaagatgtttgagatgccagagccatgagatatctgctgaggaaaagctgctaagaaagagtggaaccagcccagaagaaagaagtttngttgcagtcaacaaagatgaaaaagg

SEQ ID NO: 974 - DNA, 344 bp, Mus musculus
  misc_feature (1)...(344): n = A,T,C or G
ggagatgcccatgccatggnatgatcaccaagaacatcagcagcagtggagtggagttaaccagagccctttggagtagctcanaagatcatgtatggatctcagacactagaacaagangctgtgaagttgaagctgccttggagaccccaagacattagagatgccagagccatggaatgcctaccaaggaaacgtactaatatagagtagagaaagagaaatatttatgttgcagtcaacaaagcggagaggagttggacatcagacatgaacatgcagtttgaagtgtgcccagttgggtttttggtcttccttttgnctannatttcctctcaataatg

SEQ ID NO: 975 - DNA, 195 bp, Mus musculus
  misc_feature (1)...(195): n = A,T,C or G
cgcctgggcagaggccatantnacttnttggggaactctcanangacggacaggaancatggcatggntccatacctgaagagncacacacgtgcacctttctactggaccagagattattcggcgggaatcgggtcccctcccccttccttcataactggtgtcgcaacaataaaatttgagccttgatcagaa

SEQ ID NO: 976 - DNA, 154 bp, Mus musculus
gagaacctctcaggttcctgttctggccaccctgagaaagtgtgctgagaaccagaagaaaacaagagctgggtgtaacagcacttgggacgcagtgagttccaggctagcctgatctacatagagaaagcctaccaagagaagaaagaaaaaa

SEQ ID NO: 977 - DNA, 182 bp, Mus musculus
tggagacacgagaagacagaggagcatgtcggctcccctgagattggagtgtgaggtcgttgtgagtcaccatgtgcttgctccgaactgaacctaggtcctctgcaggagactcttaattcctgagtcatctctccagcttctggcattagtacttttttaatgtgagaaaattaaaaaaa

SEQ ID NO: 978 - DNA, 393 bp, Mus musculus
  misc_feature (1)...(393): n = A,T,C or G
aggtcaccaggcaagtncaacaatccaccaacccagncatccagccatngnccancccagccatccagncatncagcaaaccagccatccagncatncagccatncaccaacccagccatccaggcatccagcaacccagccatccagccatncagcaacccagccatccagccatccagcantagcaaaagcatnaaatgcagcaggagggaccaacagcagggggagcagtagcccccgccccaggctctctgggagctcttgaatttataccctntcaagagtccccagaattccaaatgcaaactatctgcaggtggcaaaaatcatagttagcagccctgtatcccacacctgagattaaagcaaaaacataatcacataaaaaaaaa

SEQ ID NO: 979 - DNA, 183 bp, Mus musculus
ccggagacagagaagacagaggagcatgtcggcctcccctgagattggagtgtgaggtcgttgtgagtcaccatgtgcttgctccgaactgaacctaggtcctctgcaggagactcttaattcctgagtcatctctccagcttctggcattagtacttttttaatgtgagaaaattaaaaaaa

SEQ ID NO: 980 - DNA, 100 bp, Mus musculus
  misc_feature (1)...(100): n = A,T,C or G
caccgatctcttcaggttcctgctgccagcctcccccaccgtgatggactataccctngcattccagtcaaaataaagctaacttgcccaaaaaaaaaaa

SEQ ID NO: 981 - DNA, 388 bp, Mus musculus
acttccggtggcattccagtggcttcttgctgcttctgtggactctggccaatttggaagagccttgaggtttcttctggatggacgcaagccactgctatggctgattcgtgaatattgtttacaagtgagtcgagctaccactgctgattcctgtgaactgaactgcctgctgctatcctgacaacaaagactgggattgccccaaagaactatttctaaacagcccacatcctcctctgccctattaacctttcctttccactgcctctggtgggtggtaggctagaagggaggttaaagcatttaagcacacttaagttggttttgaaaaatacaagcttactggaaaaaaaatatatatatatatatgaatgagaaaaaaaaa

SEQ ID NO: 982 - DNA, 213 bp, Mus musculus
  misc_feature (1)...(213): n = A,T,C or G
tgcgaggatgtctaacaaacccacctacctacatcgnntctttccatccttacgacaatntcttcgaggccagcctgctcaacaaagtcaggtccaggacagccagagctatacagaaaaacagtgcctgcctttgagtcatctgctccagtaaagaacgctgctactgtgcgtaaccccagtaaactcattggtctaagccaaaaaaaaaaa

SEQ ID NO: 983 - DNA, 266 bp, Mus musculus
  misc_feature (1)...(266): n = A,T,C or G
gtgtggagtagagactgttccttgtgatattatggagaagaangtggctgctntttgctctcatctgaagagtctacctgagtntaaggtaaagagatttatattaattgaattgacaaaggaaatttcaaaaaagtccaacagagactttgttntctggataagtctcataaatagcattttgaataagtatagcaagcttggaaaagaaatatgtaanaatatatggtccaaataataaagggacaacaggaagagaaaaaaaa

SEQ ID NO: 984 - DNA, 256 bp, Mus musculus; identical to SEQ ID NO: 386

SEQ ID NO: 985 - DNA, 257 bp, Mus musculus
  misc_feature (1)...(257): n = A,T,C or G
attgctgccaggctatgggtgtcccaggtactgacaggaccacaccattgctgtctttaagaaacttgctgggggctggcgagatggctcagtggttaagagcatcaactgcttttccgaaggtcccgagttcaaatcccagcaaccacatggtggctcacaaccacccgtaaagaaatctngatgccttcttctggaagatctgaggacagctacagtgtacttacatataataaataaatctttaaaaaaaaaaa

SEQ ID NO: 986 - DNA, 177 bp, Mus musculus
  misc_feature (1)...(177): n = A,T,C or G
ggaagtgagatgacagcgncagaccccccctggaactgaagntgcagatggttctgagctaccacaaggatgctgggaactgaaactgagtcctctgcaagatgctgagatatctttccagcccctggcttagaagttttcccagaaatccacgctactagcactggatgagagatg

SEQ ID NO: 987 - DNA, 237 bp, Mus musculus
  misc_feature (1)...(237): n = A,T,C or G
gctgttctgcctgcatggatgactgtacagcnngctcatgcaggcgntgaaggngaccagcangaggtccttgggaatagagntacaaacaattttgaaccaccatgtgggtgctgagaattgaacctatgtcctgtggaagatcagccagtgctcttaaccactgagaaatctctccatcacctattcttgaggtttggctnttctttttctttctttctttctttttttttttta

SEQ ID NO: 988 - DNA, 285 bp, Mus musculus
  misc_feature (1)...(285): n = A,T,C or G
aggtggcctgaggatggagctnnnacgcncacgatgctcgnttcacatnacncntaccaacccanggcngcaagagatggcccacatctttangaacanttactgcncttcccaagganctgagttacgntgccagaanccacanctgctgntccntactagacctgtaacttcaacttcctgtcactccagctccaggggatccaatgccctttcctggccttcctgagcacctgcatacacatcacagacagacagacagacatataaataaaagtaaaaaaa

SEQ ID NO: 989 - DNA, 180 bp, Mus musculus
  misc_feature (1)...(180): n = A,T,C or G
cctccaccccccaatccctgagctctnccccagggactggaccaccatccaaagaatacacatggagggaacatggctgcaaatgtgacacgaggatgaccttgttgaacatcngatctaaaagggaatgggagaagcaaagaaaaacatcctgtgatccctataatggcaaaaaaaaac

SEQ ID NO: 990 - DNA, 131 bp, Mus musculus
  misc_feature (1)...(131): n = A,T,C or G
taaggaaggacgcaaactgctnacagccttcccaaggcacagatctttcccagcatgggaaagatcctccctccccctccctccctccctccctccctncttccaccatacactcaataaaataaaataaa

SEQ ID NO: 991 - DNA, 216 bp, Mus musculus
aactgctgaggagacagactagcctgctgcctggaagagactcagacctgcctgaaggagagattctctgtcctgttgagctctccacaagtagtgtaatgaactccagggttcctgctcttggtgatgtagctatatttgagttgaccctgcccctgcccttgcccttttacttatattcttgtgaataactctaataaactcattggattacca

SEQ ID NO: 992 - DNA, 273 bp, Mus musculus
gtcctctggcaacgtggagacattgtaacagactgggaccctcacatgccgataagcagtcaagaatattttctgggagctggagagatgggctcagcagttaagaacactgactgctcttccggaggtcctgtgttcaaatcccagcaaccacagggtaactcacaaccatctgtaatgagatctgatgccctcttcgggtgtgtctgaagacagctacagtgtccttacatataataaataaataaatctttttttttaaagaataaaaaa

SEQ ID NO: 993 - DNA, 211 bp, Mus musculus
  misc_feature (1)...(211): n = A,T,C or G
tggtggactttgacactggaccttaggaagancagncggntgcgtcttacccactgagccatctcancancccncntaagtcagtttttaagagtaagttttttaaaataaaaatatctgggcatgatggtgcatcccttcggtgtcagcacttgggaaacaaaagcaggcagagctctgtgagttctaagccaggcatggtgacacagtg

SEQ ID NO: 994 - DNA, 100 bp, Mus musculus
gtccgctgtgcttgcctgctgtggtgcctccctaccaggacagactcttgtgcttttggaaccataagccaaataaacccttccttccataaaaaaaaaa

SEQ ID NO: 995 - DNA, 194 bp, Mus musculus
  misc_feature (1)...(194): n = A,T,C or G
cggtgagctggtctgttgnggtggctccctaccnggacagactnttgtgctntcggaaccanaanccngatgancccttccttccctnctttntacngnaccagagattattcggcgggaatcgggtcccctcccccttccttcataactggtgtcacaacaataaaatttgagccttgatcagaaaaaaaaaa

SEQ ID NO: 996 - DNA, 158 bp, Mus musculus
tggacgagaactctcaggttcctgttctggccaccctgagaaagtgtgctgagaaccagaagaaaacaagagctgggtgtaacagcacttgggacgcagtgagttccaggctagcctgatctacatagagaaagcctaccaagagaagaaagaaaaaa

SEQ ID NO: 997 - DNA, 100 bp, Mus musculus
atacagacatacacagatcaaagaaaatcaacttacctcctcaaaggtcaaagaccaactactgttttcaaccataggtacaaagacaatttgaaaaaaa

SEQ ID NO: 998 - DNA, 332 bp, Mus musculus
tgagatttcctctgctgcctgtggctatggattcacattgctgtcctcgaaaaccaaggatgttacaaaagtctggggcatgggactcaacaaagattcccagctgggattccacaggagccggaaggataaaagggctggtgagatggctcagtggttaagagcgccaactgctcttccaaaggttctgagttcaaatcccagcaaccacatggtggctcacaaccatccgtaatgaaatctgatgccctcttctggagtgtctgaagacagctacagtgtacttataataaataaataaataaataaataaataaataaataaatattta

SEQ ID NO: 999 - DNA, 280 bp, Mus musculus
  misc_feature (1)...(280): n = A,T,C or G
gaactgagggtctcactatgcagctctgnacagnctaaaactccngaattaactagaccgacctgccttggctntccaaatgctgaagttaaggaggtcttatgatgntnanactgaggcttgaacaagatacttaatcangccgggcggtggtggcacacacctttaatcccagcagttgggagacagaggcaggcggatttctgagttcgaggccagcctggtctacagagtgagttccagcacagcaagggcaaatcctgactcggaaaaaaaaaaa

SEQ ID NO: 1000 - DNA, 305 bp, Mus musculus
gactgagcttattgtccaattgagaggatctgaggctggttatccaaagctgcctggaaatgcagtctgggtgtgtgtggcagtctgaatatgctcggcccagggagcgaagtgtgtcactgtggctgtggacaatgagaccctcatcctaactatgtgggagctagtcttcttctagtggccttcagatgaagatggagaacgcctgcctggatgctgccatgttcccgccttgatgataatgcactgaacctctgaacctgtcgccagccccaattaaacgttgtcctttataaagaaaaaaa

SEQ ID NO: 1001 - DNA, 300 bp, Mus musculus
  misc_feature (1)...(300): n = A,T,C or G
gctataagatacttgatagcaccttnagagaccatnangctgnttctgtggnaccttccnccaaagagatgcagaantggngactccagagctggagagagagagatgactcaactgttaaaagcactgactgctcttccagaggngnggggntcaattcccagcaaccacatggtggctcacaattatctgtaatggggatctgatgccctcctctggtgtgtctgaagacagtgatggtgtactgacatatatgaagtaaataagtaaattaataaatagaaatgagactccaaaaaa

SEQ ID NO: 1002 - DNA, 190 bp, Mus musculus
gactgagggttccaagaactgccctttgggattcaaacgggagccgctttggactgactggctgccttcctcctcctccccctcctcccccttctgcttcagatttatttattatatgtaagtacactgtagcagttgtaggacacactagacgagggcaccagatctcattgtgggtggttgtgaacca

SEQ ID NO: 1003 - DNA, 221 bp, Mus musculus
  misc_feature (1)...(221): n = A,T,C or G
gggatgtgtgacacttantatcacacactactgngcngntcctgtctttctgnttcttaagctgtttcttcagggctaggctggaacctaggcttgtgagcatggtaggccaggactatgccactgaagcacacctccagcccctcactggagggctccaggtacgggtgggtatgtctaccactgagccctgcctcanatctttactgggggactctagg

SEQ ID NO: 1004 - DNA, 610 bp, Mus musculus
  misc_feature (1)...(610): n = A,T,C or G
actgagagtttctctgtgtagccctggctgtcctggaactcacattgcagacctggctggtcttgaactcagaaatctgcctgcctcngcctcccaagtgctgggattaaaggcctgtgccaccactgcctggctgacctatttattttttgttcattcataaaacatttattgtgtatgaatgttggtctgctggtctgaggaagtcatcatccttcacaagatgaagatggctgcatngggncagagattaccgccatgttggtatacacactcttgactggatattacgaagctagaagagaaaacttcaagggccgaaacctggagcagtaaacaaaggaatttctatctctggcatcttgcaatgtatttttgaaaagatctattaattttatgtctctgagtgtttttttctgtatgtatttgatcccttccatgagtctggtatccacaggacattgaaatcccttggactggagttatagatagntgaagcaaccatgtgtgtgctgggatctgagtcctcagaaagagcatcaagngctctcaccactgggccatctctccaatccctggaccagcttttaaaataaacataaatctaacg

SEQ ID NO: 1005 - DNA, 300 bp, Mus musculus
actgctactgcgttactgttttaaggttgtgccaccgctgcttcgtgttcgctatccctactctaccgaactgaactgctgatagattcatgaaatgtctgagtggatcaagctgccactgctagcctgtgaagtgaactgcagatttccagacaacagacaaaagctactccaaagaatctttctaaacatgtccacatcccccgtatctttcattttccacaacctctggtgggtggtggactacaagggaggttaaagtgtttaagaatcatcattaaaaataggatttgaaaacag

SEQ ID NO: 1006 - DNA, 347 bp, Mus musculus
ccagccagaacttctggccttcctgttggtcctggtccctcctgctgacttgtgccgaggctgaagactggctgtctctgctaggtagtcccactgctgctgattcgtgtctgctatcctgactctactgaactagactgctgatataccggtgaagtgtttgcaaatggatcaagctgtgaactgaactgctgatttccagacaagacacacaggggttgctccaaagaaacatttgtaaacaggtccacttcctctgtatcctttctttcccacaacctctggtgggtggtgggctacaaggaaggttaaagcatttgaggaccatcattaaaagtaggatttga

SEQ ID NO: 1007 - DNA, 234 bp, Mus musculus
  misc_feature (1)...(234): n = A,T,C or G
tctagctgtagaatgataacaaacanngtgatgagcccatagaggaatggtgcgactcncaagganacacaggncctcttaantgatnatnacncttanngtgaactcanagactatcggcagcatcgcattaggtcctgcacaggtggagtcctggnnctganangaggagtggatacntccttttatccctaacctanaagttatctccnatgnatagccacttgccaatga

SEQ ID NO: 1008 - DNA, 150 bp, Mus musculus
  misc_feature (1)...(150): n = A,T,C or G
cactagcagccttgagaagaagatgttgaactntnagctttgnctgnaccatgcctgcctggatgctgtcatgtccaccttgaanataatggactgaacttctgaacctgtaaaccagacccaattaaatattgtctatgaaaaaaaaaa

SEQ ID NO: 1009 - DNA, 506 bp, Mus musculus
gtgtccaaaaagaatgagacacaaagagactgagtggtttgcacaaggtcaaacagttggtggacacccgcttctggacctgctcgcctaagtggagctctggagtttatattcttaaacctcacgtgctgcacacatgaatgaacctgacctgagagccttactagctacgtggagggagactgtgtatccactacagggcaggggatgtagctcaacttgcagagtgcctgcctagcatgcacaaagcccgacgtgacatcttcagcatggagcagactggatggggcgcatgtctgtaatcccagcacttgggaggtggaggtgattgggtcaggagttcaaggttgtcctacagttttaagaccagcctgggagcgagaccttgtctcgaaaaccaaaaccaaaaccaaaacccaaaccaacttgattacatatatacataaatatatacatatatacatactgcttgcaaatatatacatccctgaatatgaaaaaaaaaa

SEQ ID NO: 1010 - DNA, 311 bp, Mus musculus
  misc_feature (1)...(311): n = A,T,C or G
gatccctggaaccagactctgtccggatgttagtgctgggccaggacccaagataagctgccgctgagtgcagctcttagnanggnngtggtgtncanaggactacatgcatgagancgtcagtctatccttgcacatgcggntnnacctgggaatccagnttgcttgcctgtgagtgcctttacctgctagaccagccccctgcccactgcctntcccccctcctatccttcctcctcctcttctttctcctcttcacacttattgtgcaaatgttttaattaaaacatctatatcctcaaaaaaaaaaa

SEQ ID NO: 1011 - DNA, 186 bp, Mus musculus
  misc_feature (1)...(186): n = A,T,C or G
agtttttggcccttganccaggtagagttatttggggagaagctcaactgagaaagtgcctccatcagagtggcnntgggcagtttctgcctccaggttcctgctttgagttcctgcccgacttcccctgaggatggacctgcgatccaaataaataancaaaattatccaccccaaaaaaaaaaa

SEQ ID NO: 1012 - DNA, 296 bp, Mus musculus
  misc_feature (1)...(296): n = A,T,C or G
acaaacagtccagcacaagccttacgaagctgcagctgggacaacacaggtatactgttcacattcctgcaagtaggaaccagctgtaatgataaaaagcaatacatgaaccagtaagtcgcgtcttcgttggggtttctattgctggagaagagacaccaggaccanggcagctnggtataaaagaaacanctcattgggggccagctttacagttaagagggnggggtccattatcatcgggggcagggaaagcatgggcagcgtccaggcagacacagtgctggggaaacccc

SEQ ID NO: 1013 - DNA, 173 bp, Mus musculus
  misc_feature (1)...(173): n = A,T,C or G
aaccaaccaacaacccaccccatnnntcggtgacngtagcatttatagaccctctggaaagtcctcaaattccaaatgtcacacaattgcagaagctatctgnagttgggaaaaaccgtgcctctgctagagcactaagcaaatcagagtcagctgctgggggacagaattga

SEQ ID NO: 1014 - DNA, 328 bp, Mus musculus
  misc_feature (1)...(328): n = A,T,C or G
caggcctgagggtccctgccccaagctgggtttggctgataataaagaactgccatacagccaatggctgggcagtaagacaaggggctgggagagagagacagagaaccaccaggacttggagggagaaggatccgatgtcagagctgcaggaaagaaagcaaccagccaagtaagaattcgggaaaatgggggctggtgagatgactcagcgggntaagagcgcctactgctcttccaaaggtcttgagttcaaatcccancaaccacatggtggctcacaacgaaatctgatgccctcttctggagtgtctgaagacagctacag

SEQ ID NO: 1015 - DNA, 201 bp, Mus musculus
  misc_feature (1)...(201): n = A,T,C or G
agcttggtgcctgcatatcaggaagacaganaagacagaggagcatgtcggctcccctgagattggagtgtgaggtcgttgtgagtcaccatgtgcttgctccgaactgaacctaggtcctctgcaggagactcttaattcctgagtcatctctccagcttctggcattagtacttttttaatgtgagaaaattaaaaaaa

SEQ ID NO: 1016 - DNA, 413 bp, Mus musculus
  misc_feature (1)...(413): n = A,T,C or G
gtgatatggatcaaatncttcaagactcgaagcccaaacaaatctttctgcttcttaagctgnttcttcagggctaggctggaacctatgcttgtgagcatggtaggccaggactatgccactgaagcacacctncagcccctcactggagggctccagttctgtgccccgtgtgataaagtgccttggttgtaaaaacacgactcctgtgagattacagctgacctggatcagaagggagtgtgtgttgggatagcctgtctcccaagataatctgtctagccttggacaaacaatgtnaatgggaagagactgaagaacctcgggaaggccctctacagccgcaacaattttctcattccaaacccctcacccaatcccaataaagggncctggccagctctgccccctgg

SEQ ID NO: 1017 - DNA, 509 bp, Mus musculus
  misc_feature (1)...(509): n = A,T,C or G
aactgagactcttgcaaagaagcatcccagccggntccagtcccttgtatcctcgtggcgctcccaggtcagctctcgaactcnaatactttccaaggctgcccaccacctgaagatcaagttcctattctcaagcttgtatcgatccaggcttcctcgccctggtcctgtgaatcagtaaaccagcgcccttgctgagctgtgcagtctgtccctagtcacaggttatgggaacagggaatggctgaattaagattcaaattcaaccccagaagccatgtaaaaagctagatataggggactggagaagagatggctcagctgttaaaagtactgggctgttcttcctgaagacctaagctcaaggcccagcacccagatccaggcacgtcataaccatttcccgctccagtcccagggattcaatcctcttctgatcgatttgggaaccaggcatgcatgatgnggngcacagacacacaggtagccaaaatacacatgcatgaaag

SEQ ID NO: 1018 - DNA, 313 bp, Mus musculus
cacatggggtatcaagcctccacaggaccaagggcctcctctcccactggtgccagatgaatccatcctctgctacatatagagctgaagccatgcttctctccatgcatactctttggtacccacaaagcaacttcattggaaacttttgccccaaggaatggctaatagctttccattatgtaaaaaattttgttgctgcttggaaacaagaagttaggacattgaatctttcagtgtctattggtcattatatgggatattttatcaggtgatccctctgaaggagttttactacaagccttggctctga

SEQ ID NO: 1019 - DNA, 444 bp, Mus musculus
  misc_feature (1)...(444): n = A,T,C or G
tccctttgtctgcgtggaacgagtctctggggcaggtgggcaaggagttggcggatgacagacagaccaacacgcaagattgtgtagaatctgaatgtattttgtcaggtcgagcatcaaactttttataccgaagaaataacaagaaaccaggcaaaatacaatccaccaagttacagtgatgcaatacataaggaatgcatacatcaaaagaaggcggggaccaggctgctgccgaaaagaagggagccaggtgtaaactggtctattgttaaacccaccaccagggcttctgcactagcagaccttttcatgaatactgcaataacccaacgccccatttcctgggtctacngaagaatttaccaacttgcttttaatgtgaagcttgctatcctanctgtagagaagatctcggctcagtgggattccctagctctaata

SEQ ID NO: 1020 - DNA, 297 bp, Mus musculus
  misc_feature (1)...(297): n = A,T,C or G
agcaggttgattagacttgacctcgctgccgctgagcatgagaccacctggggtggagccttccgacctagccggctctattgttctgtcacctgctgctgctcgtctccaagacactgctacctgctgaaaggcccttgagataatctggagacagcatccagccgatcacctactggctggcgaagggcaccaagaatggattgtttggggggggcgggggaggaatggtgggatggggatggncggcccctctttataagtacagactcttantaaactttggggccttgaaca

SEQ ID NO: 1021 - DNA, 331 bp, Mus musculus
ctgcattaagtaacagctgagggcagcttatctttggagaccctggctgtcctctataaacgaccagccaaggcaggcgaggagtctggtggactgggctgataatagggcgacagcggctgaggctgccaagactgactctgacttccatcacccggtcaggctctactggcccaagtcccactcctttgactacctctacagtgctggggagatattactaaacaacttccctgtccaggccaccatcaatttatatgaggattctgacagtgcagacaatgaggaagacaaggaggaggaggaggaggaggaggaggaggaagatgat

SEQ ID NO: 1022 - DNA, 274 bp, Mus musculus
  misc_feature (1)...(274): n = A,T,C or G
tactgacccccgctagacctctaagacaactcantacttgtgggacttacatcatgccgaanaggagccgagaactccagtgtttggaagaacagctcaggctttgaaagcaatatccaaataaggcacnggctcttcatacccacactccnactgagtacagtgcccagcacatgggctaatactccatacatntttactgcatgaataaaagatcgatagaggggangnncgngcctcttctgggcgtggtgatccttccctcacagcaggt

SEQ ID NO: 1023 - DNA, 117 bp, Mus musculus
  misc_feature (1)...(117): n = A,T,C or G
gcacggcctccattgtgctcctgnacactggacagaagatgcctctgatngtnctgnngacntgnaanagngagcctgcncctgngaatccatccattatacatgcccttagcgcag

SEQ ID NO: 1024 - DNA, 487 bp, Mus musculus
  misc_feature (1)...(487): n = A,T,C or G
gactgagagtgaagaccagcgaagaccngtgaagcattgtacacatcgaaatgtaatgaacctcctttcactgttcgtggagttccgattacattctttncaaatatcacacaccctctcaagtgtccacgacagcaaaacatcacaggctctcacatgcttcagtaaaacagcctctccccagacagcatccagaaaaacacctcgtgacatgactgagtttccaaagaaaccagaaattcccacctcaccctgggggctggagagatgttcagtggatccagggcatcgctgctcctcaagaggacctgggttccattcccagcacccacagggcatntcacaaccatccacaattccaattttggggcatctgacaccctcttctgtcctctgatggcaccagatacacatgtgatgggcngacggtattaaangtaatcaacncncccttgctgaaaacccaaaattcaattaaattttaaaa

SEQ ID NO: 1025 - DNA, 347 bp, Mus musculus
  misc_feature (1)...(347): n = A,T,C or G
agagcgtcttctataatttacacagcccattgaaaccaagaaattaccaactggagcttgccctgcctgccaagaaagggaaaaatacaataatatgtgcccctactgnntgtggaataanntttnccgntgnttgttatatntnaacaccatcttanaaaattcccatgngctacatataaggganaggggncttcttcagataaccagattnntgtntatgatcatgaggcaacngggggggctcacagatattttgaaagacttgggtacaacattgcnagcatttctggggcaacatctgatagcgtntnagngcagcacatcattgaagacaatgatatcat

SEQ ID NO: 1026 - DNA, 176 bp, Mus musculus
  misc_feature (1)...(176): n = A,T,C or G
gccccagtactgaactccttcangatttgacttgagcaacggaaganaaggcgctcactcggtggagacattccgtgaagagagtaccggcccacctccaggttttccacactccccttctctgagagcgggaggaagaagatcgctatgtcaaatgttaatttaaaaaataaaaa

SEQ ID NO: 1027 - DNA, 270 bp, Mus musculus
  misc_feature (1)...(270): n = A,T,C or G
taaattcaagaatcctgactcaagagcttgctagttaggaaggctttttgggcctagagcaaagaacagnggctgtaaagtcatcccaggaactggctagccacaaagatagagaagatatncaggattgggggggattggcccaggcgcctcccttatctcccacccttgtctaccttgggttaaaagttaaccagatgttctggntgacttcaataancacggggggggnanaattccctgactcactgacctgacataatctttttt

SEQ ID NO: 1028 - DNA, 149 bp, Mus musculus
  misc_feature (1)...(149): n = A,T,C or G
cctaggactgaagtgtgnagctctctgcttgctgctcccatacgctgtgcttgcctgctgtggtgcctcccttacnaggaacagactcttngggctttggggaaccataaagccaaaataaaccccttncctttcccataaaaaaaaaa

SEQ ID NO: 1029 - DNA, 228 bp, Mus musculus
  misc_feature (1)...(228): n = A,T,C or G
gcgctgtatccacaacanacaaaagttcccaccttntatncatanccnngatattgaccctcccacctacaaggtttgccctnngggtgcactctactgagaaggccngattgcttgnanagggcccattaacctgccggaccctggacnnacaagatccggcccatcanggcctctgtcatcactcaggtgnttcatgtncccctgggaaaagagaaatatagggac

SEQ ID NO: 1030 - DNA, 181 bp, Mus musculus
  misc_feature (1)...(181): n = A,T,C or G
actgaagctgacccacctagatgtggganagccccctttgctcagtgctttggcttaagtgcaccaaaaaatntggtnttggaaaccaggggggggccttacctaaaactccttnaanccaacanaccggactttggntggggcctttttgaaaaattgggncggggggggaccacctgga

SEQ ID NO: 1031 - DNA, 173 bp, Mus musculus
  misc_feature (1)...(173): n = A,T,C or G
cagagcctaggcgctgtnggagccanaaggacntttggtctgttatccngaccanntnnttgttgcttgntatccagacacctcaggtgagggtggtcttnaagacagagcgaanagaagcccttcctttcagttttccagagcatctagncatgcagtgcctgtgtgccaag

SEQ ID NO: 1032 - DNA, 134 bp, Mus musculus
  misc_feature (1)...(134): n = A,T,C or G
gactgagtctggcttgcaaatgcagcttgagcagtgcagatacttagtggaagaagaaagttttggtccacagncctatttcacgggttagagcagttgtgcnataaangccaatggatggtgaaaaaatttaa

SEQ ID NO: 1033 - DNA, 258 bp, Mus musculus
  misc_feature (1)...(258): n = A,T,C or G
cctgtatgatgtcaaccccccagaaggcttcaatctccgcagggatgtctatatccggggtgggcattccttgctgaanacgctgttgaanactgaaanagngggtgntagtcctgcccccgggggggcccgccttntaccactggcaaaagcccttggacntccaccanggtccggatttcccttggtcccggagtttttttggaccctccccgagttttnaaataaaaaaccatccccccgtttataaaaaaaaaa

SEQ ID NO: 1034 - DNA, 153 bp, Mus musculus
  misc_feature (1)...(153): n = A,T,C or G
gactgagattgtaggatcagtgaaatgctttcctaaaaagngaaaggctaaagatgtctagacaaaatttagnggctttgacagngaccacccttctgggtgtggacatggngggatttgtcctgtggaaaggcatccagcggtagatggagt

SEQ ID NO: 1035 - DNA, 292 bp, Mus musculus
  misc_feature (1)...(292): n = A,T,C or G
aggctgtactccctgtccacggtccagatgagcagatagatgcccatttgcctcctaggctacgaagagctaagccacattctggataccccangggacnngtttnctnctgacaagatgccaaaagccattgnttgagactcccaagagggagggggcctcttaagctgccctatcccagaagcaccttctttcccccncccccaaggatnngccccacctttctncaggggacttcctctgnaaagccatggggcttaagggacccaggntgaaaagcccctccgccccc

SEQ ID NO: 1036 - DNA, 491 bp, Mus musculus
  misc_feature (1)...(491): n = A,T,C or G
gactgagggtctggaacactgcctgtntgtggnggncattgcgcattnaagtgnacctctngncccctgntgcaanaatgagagnncncagcntgctcangaagagcttccttggaggatgagaggcatggnaatctaagtataccctttaagcgttccaccaaggattttngagatcctttcctanatcaaaggtggaatatttgngggatcttgggaaaattgagcatttttttccccacttgctngantgtaattgctaacatgctctctctgctccaacctggagaagccagtctctcagaagaaccagttgngatactttgctgtgagatgcctgccctaagagagnagcagaangtncttnaacnggntcctctaangtgataattanatgtgaagcgttngacttaangagatgccaagttaactcagcngangncncacagacgataaatagcagtganggaagcccttcatgccggaaggca

SEQ ID NO: 1037 - DNA, 297 bp, Mus musculus
  misc_feature (1)...(297): n = A,T,C or G
aaaatactgaagcaggctatgaaacatccttcctncaacctctgaatccaatgttgtgttagggcncaatctnngaatggcctcnnngngggggaggacccatatatctgnaacactgaancggttaatntgtncagctcccctccctccgtcttcctttgccgagacatggggcncnctatacaccaantgggaactcacaaaaaatgcccccttgtctcctacctttaannnatnnggcacccacacccttgnngggggggggtttttccctcnnggagctacaaaggccatttt

SEQ ID NO: 1038 - DNA, 199 bp, Mus musculus
  misc_feature (1)...(199): n = A,T,C or G
gacatcactccagcctacacaatgagaacagggttgtgaaggatccctgaggcatttgagggtgggtgacacactgtcaaaaccgcgatcagtcccagtatatttggaacttatgtagctccatgcntgctaactaactctgagacagaagagcttgtnccanccattacccacaggagcaantctattctcacagtaa

SEQ ID NO: 1039 - DNA, 386 bp, Mus musculus
  misc_feature (1)...(386): n = A,T,C or G
aacagcagaagggaagcaacaatggttcttgggccatatacactggtgctggcancanaaganggccatcaaagactctcaaangcccaagctcttncccatgccaacanggtnnccccncaggggctntaggcatccccccccctccanngctcatgacagaaaaganngtggggatgccaaacactcnagcaaancnaggataggccataaattgatnntagagcggggcnngnaagtccannatgncnttgatgtgccaagccactnaanactcngggaaactgaggctntaggctntttcaaggctatgcatttggagttggggcccttgcctgctgaaagacttgganctccatccttntggggnccctcccattgggtat

SEQ ID NO: 1040 - DNA, 232 bp, Mus musculus
  misc_feature (1)...(232): n = A,T,C or G
actgaaggtctcatgtaccccangttgacctnaaacttgctgtgcactgnaggatgaccttgaactacctgtgttccggcctncatctctgagtgctaaanataacagggtgtgcttcaccacatcgggncatgtggggctaggcacaggccaccccttgaccttggttttncgcaattgctaagtcaatgctcgctttgnctgccnaggacacctcctcccaccaaaggaa

SEQ ID NO: 1041 - DNA, 271 bp, Mus musculus
  misc_feature (1)...(271): n = A,T,C or G
aaacttgctgtgcactggaggaagaccttgaactacctgtgttccggcctccatctctgagtgctagnataacaggtgngcttnaccacantggnacatgtggggntaggcncagacacnccttnacctngnntttcgnaattgctaaggnaatgctcgctttggnntgcccagacacctnctcccaccagangaatggaactgaagngggcgatgatgnggacagaatgtttcttctcaccaaggacatataaatgatcaaggacatacc

SEQ ID NO: 1042 - DNA, 372 bp, Mus musculus
  misc_feature (1)...(372): n = A,T,C or G
ccctgctgccacctaatctctgctcctctgcttctcccctgctcccgagccttttctctagagaagacnntcnaggcgaccttttgtaagcatgangatctacttttgctgaaaagaaaacaggttttcctttctgcctcttgctcagctnatggntttgagatcctacccctacatgagatgcttagacgatggaaaacgtgtctctagccaaacttcngnnncctcccagtttgggctctccctaaaaatactangaagagaaaaaganttcngacgataannncactngacaaaaataacacccgggaagaggctcttaanatngaccagngcatnctaggtctagcctagcctgggctacattacaag

SEQ ID NO: 1043 - DNA, 246 bp, Mus musculus
  misc_feature (1)...(246): n = A,T,C or G
agactgagtcttcagantctatttttanctctcagtgctnaataaccttctcctttaatnattataactttggctgctggcatatancgtgaaatgcctccanccttgagcaaggaaaccctgtgaatgcccttcttgcatgnanccttggaaatagataatattaactttttcccttggcccttggggttaccaaaatgcccgntttttgtngcntnnnattncgcncngggggggaagggcctt

SEQ ID NO: 1044 - DNA, 196 bp, Mus musculus
  misc_feature (1)...(196): n = A,T,C or G
cctccatggctcattcaaagacaaggacnncgatgggaaaattactttnccctcctggagtcanggaaatctcaagataaaantctctaaagaggagatggtgaggcggtttaaaaaatggnttttaaaancttttnnttggnacatgggccccagnacttttgaagaagnaaanggaaccttttttcttaaccct

SEQ ID NO: 1045 - DNA, 129 bp, Mus musculus
  misc_feature (1)...(129): n = A,T,C or G
ctatgctgaagatccatgtaacctcaaagaagaatacccgggngtngncttggcctttatcttnggaatactgcgccgtatganagggctgtattaaaaggggntnaanggatttaaaggggaccactt

SEQ ID NO: 1046 - DNA, 382 bp, Mus musculus
gacgtctggggagctcctgcattaagtcagactgagaatctaaggagctgagagccaggcagaagtgggatgaagcccgctgatgccaaagtacctttaatctcccaggcagaggggccttggctggtggtccttcttggcccataccaaacaggggaagagatcttgttggaagaatgtgtcactgggggagctgaagttccagaagactcaggccattcctagtgtccctttccactgcttcatggttatatattaagatgtatgccctcagcttctccagtaccatgttttcctgcctgccaccatgttccccaccatcatggtcatggactctaaccctctaaaatcgtgagccccaaataaactctttcttctatga

SEQ ID NO: 1047 - DNA, 249 bp, Mus musculus
  misc_feature (1)...(249): n = A,T,C or G
gacgtctggggagctcctgcattaagtcagactgaggttcanatcttccagataccctcttgatggatgctgaggtgacgnggttcaccgacgncngtagcttnatccaagaaggatacaggtacacaagggcnncagaggtatcagagactgatnactacatacatttgctacagtccatatccatgggaccatctacagagagagagagcgagnggcctctggacaactgaataaaagactatcaca

SEQ ID NO: 1048 - DNA, 120 bp, Mus musculus
  misc_feature (1)...(120): n = A,T,C or G
caaccaataagcaacatntattatgncacaattgctngtaatttgcacattgaacttatgaatgcaaagngangnganggnccctacacagacctttnagaacggcacacctgaaaaccc

SEQ ID NO: 1049 - DNA, 202 bp, Mus musculus
  misc_feature (1)...(202): n = A,T,C or G
tcctgggcttggacaggggngggcnagaactaccttgntgaaccaacttcacattttgaagacttcaaccacatcacacctacacagggatttaacttcaaatgtgtgcattcacaaggttttaaacctaantgnatgggancnttggccgnccnagaaggnaannncagnccttttttggggggggggggttttaaaaaat

SEQ ID NO: 1050 - DNA, 415 bp, Mus musculus
  misc_feature (1)...(415): n = A,T,C or G
gactgagatctatcaacctgaagacccagatnttattcagactcccactcatctncacctcgtgnccaaagacctnccatgctgctcaggagganacagataaccnacccntgataagtntggttccctttcancctcctcctggccacctccctcttctgtggtcaaaggatagaacaaagactttactacagatgaaagatgttgagttttgagtttcccggcaacatctacggcttccntgngggttgggtctcacccttgtacccgtagnggcaaacccaggggcagtggcactatgggcagaggacncntcctgtgacaggtacaggcntttcctgaaaaaatggcatctgatcancaacataacattnttgggggaaactaaagagcatttcttttccaaaaaaaaaaa

SEQ ID NO: 1051 - DNA, 323 bp, Mus musculus
  misc_feature (1)...(323): n = A,T,C or G
cccccaatactgaagctttggcngtggaccggnnggttctctacaaaatgaagaaatctgtgaaggcaatcaatatctctgggctggcacncggtggagaacgaggaacattacacccacnctctggagaagttcggtggcaactgtgtgtgcaaaaatgatcccacacttangaacncgcgttttctgaagttctctgngctcnccaaaggagttgacgggcnctcttcaaaaacctgatncnnaacatgnnngggggggggtctngttcccctnggggacagtttgggtgaaaaggaaaanctnaaagggattaaaagggg

SEQ ID NO: 1052 - DNA, 300 bp, Mus musculus
  misc_feature (1)...(300): n = A,T,C or G
ttgcctctccaggctccatcccngattatacanccacaggccggntncaacntttaagactgtcaangatngaggntgtgagacctattgtaagatgttccatngcttgtgggantggttggatttacntagtggaatgacattcctatcaaagtactgnaagggatncaaagcantcccatcaaaattccaacattattctacaaagaacttgaatggaaanttttcagctnnggggggggaacacaaaaaactcagaatagctaaaacaatcctgaataataaaagaatggttagccc

SEQ ID NO: 1053 - DNA, 175 bp, Mus musculus
  misc_feature (1)...(175): n = A,T,C or G
aagcaaaatactgagtttgttntgncgtaaaacctgcatttcagtcccctangtgtnttacnagatagtcttcctcatggaagaagagngggacntaccagancatccattaananctccaatatgcaagatccaacanaacacactttaantcaagtatccatccctgaagcct

SEQ ID NO: 1054 - DNA, 178 bp, Mus musculus
  misc_feature (1)...(178): n = A,T,C or G
aaactctacatcaaggganatcaancanccatcagtcngggtngngggnggnccntttantttccttttaccaatgacccattttgataagcccgccctgcaaaaggcttgctccttcctacctaanggaaacctttacnttaaaatggggctnaatggggggcccccccctcctttt

SEQ ID NO: 1055 - DNA, 350 bp, Mus musculus
  misc_feature (1)...(350): n = A,T,C or G
gactgagcttcctgaagatgccaggcttntcttggctgcaatnngatcaanatgnnaaactctcancttcttttccagcaccatgtntgnctggatgctgccatgcttnccgcnttgattaccctgatgataatggactagaanctctgaacttgtaagctaagccccanttaaatgntggcccttttataagaataaaacaaaacccagcagngancgttntgcaatagaactaaccccaccnngggtntaaaggctgggattataatgagcagaacacagnctgtgttttctgngttcaaaagcaagactgagcattttggngaagatttgggaagaataaaaagcag

SEQ ID NO: 1056 - DNA, 127 bp, Mus musculus
  misc_feature (1)...(127): n = A,T,C or G
aaggacacaagaatgagtgtgtttctgntaaatacaccacagggtctgtaaccttaaggatggggccttggactttcactgnagnatggaatgtctcacctttcctaaaggtatttgacatgggtgg

SEQ ID NO: 1057 - DNA, 182 bp, Mus musculus
  misc_feature (1)...(182): n = A,T,C or G
gactgaggatggatgagaattacaatctcttgcccacggaagtcaatttccaagatgccatcttcccagacacccaggagancagaaggatgttttccagccttttccagtttgctaactgttcccaagggcagcagctgacgactttctcgagtgactgggaggtccaggaagacaacagg

SEQ ID NO: 1058 - DNA, 137 bp, Mus musculus
agtgtttctctgtgtagccctggctatcctggactcactctgtagaccagactggcccagaattcaaaaatctaacagcctttgtgccaccttcaagttctggggattaaatgcaccttgtcacagcaaaaaaaaaa

SEQ ID NO: 1059 - DNA, 222 bp, Mus musculus
  misc_feature (1)...(222): n = A,T,C or G
actctactttgtgtcaagttgacaaaaacanacantgcatccagttgggagagacaatgtatcaagcaataggnnaangacagggcttctcgggctggcgagatggctcaccggttaaaatcactgactgctcttctgaaggttcctgagttccaaatcccagcaaaccacatggnggctcacanccatccngtnaccaaggatctgggcgcccctcttctg

SEQ ID NO: 1060 - DNA, 294 bp, Mus musculus
  misc_feature (1)...(294): n = A,T,C or G
atcacggcaacctccccgncatgctgccgaagcccttctnntctccaatggacgtgatggtanctacctgcngcgggacagcantgagcagactgnnctctactctctctctgtgagagccaaagactctgncaaacactttcatgttgaatatactgggtactcgttnaaattcngctttaatgagtattcatcnctaaaggattnnggccaagcantttgcaaatcagcctttgattggaagcganacaggtacnctggcgnaaaccctgcctgantaatacggagatgaag

SEQ ID NO: 1061 - DNA, 348 bp, Mus musculus
gactgagatgtctcacctcttgtctaccgaccgagcccaagtggacgtgcctcgctccatggtgactctgggtcctgcgtgctgccggctttatttgaagatacttctggggccattgcatttgttcagtaaatactggattaagtccgcttggtgcctgcagagacaggagacagagaagacagaggagcatgtcggctcccctgagattggagtgtgaggtcgttgtgagtcaccatgtgcttgctccgaactgaacctaggtcctctgcaggagactcttaattcctgagtcatctctccagcttctggcattagtacttttttaatgtgagaaaattaaaaaaa

SEQ ID NO: 1062 - DNA, 159 bp, Mus musculus
cagctcccctggtggagctggagctacaagcaactgtgaaaactactctgcatattactcttcaaaagcagtaacaagtgatcttccacccctctgcctctcctctgcaagaacagcaagtgctcttaacctgttaatcatggagcattttcactagca

SEQ ID NO: 1063 - DNA, 142 bp, Mus musculus
  misc_feature (1)...(142): n = A,T,C or G
gactgagggtttcagtgtatncctggccgncctggactcaccctgtagtaccanantggnctcanattcacagagatngactctgccttccaagtgctgnctgggattaaaggcgtgtaccaccgcctcctggaaacatcat

SEQ ID NO: 1064 - DNA, 309 bp, Mus musculus
  misc_feature (1)...(309): n = A,T,C or G
gactgagaatgtctaatgcanaggaagaaacntgctaagaaaatgagaaaccagcccagtaccgtgactctgtcctccggctttgtggctgagagagatgganagcatcattttggaaaggggaagccgtcccaatctcanaaacaagagcnacanttctggancctcttggnngggncaaatcatnangagtgnanacttgcttnntgantntnangtgaatgagcaatnttcctacacnnncanntttaaccaaagagggaggntggaatcatgctnctgagngcacttctcacgagatccccattt

SEQ ID NO: 1065 - DNA, 137 bp, Mus musculus
  misc_feature (1)...(137): n = A,T,C or G
cctgttgctgtcaagatggagcancaccctattacccctactanggaaaaagccnncagaggangatnggggnngggtggttttttgacaaccaaaattcctcccccagttactttgntttttccaggcaaaatttt

SEQ ID NO: 1066 - DNA, 229 bp, Mus musculus
  misc_feature (1)...(229): n = A,T,C or G
aaggaggtcggccatttcctcctgccttcgggaagatntagccattcctttgggaaacattnntngagagangggctagggacccaaaaatttcgcttncactccngaatacngttctttcaaaaaaggtgtnaacaaaggggacctttaccttttttttttccccttnanacttttacttnggaggnnatcaanccttttgaanaaagaaatggggacctttgctttt

SEQ ID NO: 1067 - DNA, 165 bp, Mus musculus
  misc_feature (1)...(165): n = A,T,C or G
actgagtttaagtattgtttaactgcatcaatggagcacatacagggagnttgcaanagatcagcactggcttttgaactnaaganncggngtttgttgctcaacttcatctcccctacntttgttctaaggntgcnntanccnccggcctaatataagggcaag

SEQ ID NO: 1068 - DNA, 229 bp, Mus musculus
  misc_feature (1)...(229): n = A,T,C or G
tgagggtcgagctgtgcagtttcagcggntacaagaatctaccccgggacacgggccggcgctacccccaggacccgacngggaggggtttnnnggtttcttaatgcaaaaatgtgagtcacccnttcctttccaaaagnaatcctcnggcagataaacctggactgtcctcttacanaaaggnancacaagaaaaggggcagtncggnaaaaaatttcaaaagggaaa

SEQ ID NO: 1069 - DNA, 237 bp, Mus musculus
  misc_feature (1)...(237): n = A,T,C or G
agtaggacgcggactctgagccagcagagactgaaggggaagccgcggaggntggggaccctggagacaccggtgctgaactggatgatcangcactggtctgacgacatcccttctgatgctgaagcggagcatcgcttacagagccaggccaaggtgaaagcagagctggaagctganaagtatcnggaaaacgaggaagagaaaccctggngtggaaaaaccaaaaataaaaaa

SEQ ID NO: 1070 - DNA, 262 bp, Mus musculus
  misc_feature (1)...(262): n = A,T,C or G
tactctactatgagcctccacctgcttctccattngaagngaagacctnccatccggagctggnnaantgtctcaccagttaagagcacttactgctcttggagaggacccanaccagttcccagaagccatatgggaagctcacaatcttctatgactctgcttgcggggagaatctgacactgncttctgggataggaagnctttttctctgnctagcctcttcaataaagacatctgcgtgtcctcaccccaaaaaaaa

SEQ ID NO: 1071 - DNA, 385 bp, Mus musculus
  misc_feature (1)...(385): n = A,T,C or G
gactgaggggcggagncgactgtttcgtgcaacnactaccancaggaaagaccaaagaccacaggngagctgtgcctgcacttaccaagcccncgaatatgcatnaccntgangannagtttgttgtttttgtaggagatagacagnttcgcctncccaccgaccttnccaaccggccgggcccacgtcccatctgnagaaatnaaggnaacagaagtctatnggcancantgactgctgttctggnggtgcngagttcaaatcccagcaaccacatggtggcttacaaccatctgtaatgggatatgatgccctctatggtgtgtctgaagacagctacagtgtacttacatttaataaataaataaatcttacaaaaaaaaaa

SEQ ID NO: 1072 - DNA, 290 bp, Mus musculus
  misc_feature (1)...(290): n = A,T,C or G
tcattgaagctgcttctctgtcattctggaacctgagagactgaggcagaaactgntcatgaggttacggtcaccatgngtgcttggttttatcaagttggcaagacttacnancttggaaagcgntatggntngnatatgctcgacccaggagtggtactattagaaggngtngccttgttgnagtaggngagggctacttgnaagaccagagacttngtgtagagactanncnangnccgcanatgctccnctaggtctctccagccacnttcagaggaaaggaagaa

SEQ ID NO: 1073 - DNA, 452 bp, Mus musculus
  misc_feature (1)...(452): n = A,T,C or G
gactgagtcccgcatggttcgaaatgagaccccctacctcatctggaccactcggcgggatgtgctggattgtcgcttcctttccaaggatcagatgataaaccattatgcccgtgcaggctccttcaccacaaaggtgggcctttgtctcaacctccggaatctgccgtggtttgatgaggccgatgctgactctttcttcccacgatgctaccgattgggggcagaggatgacaagaaagccttcatagnnnangggactcnaannncaggcctgnctnccttangcnggctggccnacaggggaaaagagcaagcctcccnttgnggcctntgnaancnnaancntttcctnctaccaangggncttncattcataagccaaccttggcattcagagaagcctanggagccaggcttgtaccctgtancgggttctagaggtgggtggg

SEQ ID NO: 1074 - DNA, 143 bp, Mus musculus
  misc_feature (1)...(143): n = A,T,C or G
ggggtctttcagacataagaactatnactctcccacatgctccatgtntattggntgacttcatttcntgaaccccatccgnnaatcgncagacagaagtggaagaagcctttntagagagccaaangccgacggaggacgga

SEQ ID NO: 1075 - DNA, 199 bp, Mus musculus
  misc_feature (1)...(199): n = A,T,C or G
actgaggacaaaggcatgaaactgaaagctgctcgtgtgtgaacgctgggatttcctgtgcaaacaggagatggtaggggaagagggaancctttgtgataggttgtgaggaggcgctcnctgaaaagaacctaccccnccacccttgaggggtccttgngccntgcctgctgaggantttcagatacttattaaaaga

SEQ ID NO: 1076 - DNA, 256 bp, Mus musculus
  misc_feature (1)...(256): n = A,T,C or G
gactgaggtgaggcacagctttggctganactnangcaacagaancaaaccaaccccagngtggggncatcacgcttttcattcagcgttgaagaatgaaattatgtcatctgcagggaaacggatggaactanagatcactgttaacaacaaggaaaacaagcaagcnaacaaacagacttccaagcagatatgggttctagcctgcaatcctagcacttggnaaccagaaggaggctcagaagttcaaggtcag

SEQ ID NO: 1077 - DNA, 214 bp, Mus musculus
  misc_feature (1)...(214): n = A,T,C or G
actgaggtggagaaatggaaccgacgtgatcagaagctgctggaggcggtgcagcggggggacgtgggacgcgtggctgccttggcctctaggaagtcagcccgacccaccaaactagactcaaatggccagtccccgtaagtaagattttttnaccncnacctggnatgnnaggatngaacttcaaaacagtnaggcaagggctataacttca

SEQ ID NO: 1078 - DNA, 464 bp, Mus musculus
  misc_feature (1)...(464): n = A,T,C or G
actgagtgaccatgaaagataccaggctgacggcactggaaactgatgtaccatctgtccccagaacagtctggnagtggccctaatgaagagctgtgcaaacctttagcacacngtcctggancccacacagcanagttgagtgagagantggtccanttagccaacattggggagctgntctccatgntggnctcntccanactggttgtgcggtatgacgtanacngacatcttcaaggagtccctcanttntgaacgnggncctatgcttgtanacacgttggttgattatnacctggaaaccanttctnagccggnattgcaacatcgctgaccaccttgaaggagccacacgataagcacctcttgnacaatactctgnangccnagaagnntaaccgaacactttgctccaaatcnntaacnantnaangngngtagaggagacttgtttacaccgg

SEQ ID NO: 1079 - DNA, 310 bp, Mus musculus
  misc_feature (1)...(310): n = A,T,C or G
cattggcccctgaagctacatgggatatcgcaaacccgtgggagaagccnatttttctncatctggggnggctcctcctactggtctcctgaaggcagtggaccttntgcccccnaaaacttaancaggggtctggntagcttcccctaangggnantggttctggcttctggttccttcctcctgggttccactgatcccttgggtganaagcccnggttccctattnaaaaacnacncatnangggctgggaaatgngggttaaaaccgggcccaggntnccngggccttgaaagagggccctttttc

SEQ ID NO: 1080 - DNA, 262 bp, Mus musculus
  misc_feature (1)...(262): n = A,T,C or G
taccatctcttggggaaactcaggaaccatntangcncggcttctgcagaagttctnactgtggaaaatacacagcanctncacccactttccagagtggctgactcataggctangtctcctccnnncngccaacattnaatttgggnttgaactgcacccatggttccctngtctgagcatttgaatgngtntntncgtgacggataacangcttgggngncttagactggagggggggcgcgncacaagaggaagaact

SEQ ID NO: 1081 - DNA, 259 bp, Mus musculus
  misc_feature (1)...(259): n = A,T,C or G
gactctgggacctcttatatcnactatgatatnngcatccacacaacttncatggggtcttcnattcgnncctntcttgtgtacgantnaagggtnttaatagnccgtgnnggctgaggcaaagactccaaagcancgcgttgtggggggggtttaccagaactttncgtntaaaaacctgtttttnaacatgaacagtcgncagnatggnccccccccngcccgccagggcttgggaagatctcctcaagaaaaggcc

SEQ ID NO: 1082 - DNA, 314 bp, Mus musculus
  misc_feature (1)...(314): n = A,T,C or G
gactgaggtttccctcctcaaatctcccatggagcactctcggagtcccgagccagctgagcattcttacaggagagaacagagccngccntgctaagcatgacacagagcaccggaaagcaaggagaagaaagagatcttgagggaaagnagggttcccngnaatgnanntgttnncaccaaaangggnctggactgctnatttnattaattaaccgggaggcnttgggaaacccgnggcttgggggntccccnggggngccggnntatnaaggcttgnccaattttnncaaaggggcaaccccttttctttt

SEQ ID NO: 1083 - DNA, 142 bp, Mus musculus
  misc_feature (1)...(142): n = A,T,C or G
attactgaggggtctcaggcatctgtntttgctgctgtcntgctactaaaaancctcaaacgggaaaantttgggtttgccttttgggngggggggccnnccgaattnttanncccttttcaaaaagggggccttgaaccta

SEQ ID NO: 1084 - DNA, 225 bp, Mus musculus
  misc_feature (1)...(225): n = A,T,C or G
agtccttgaagctactgagataatgggaacaatgggagtagatagtcccnttataactcatctggggattctttctcnaactttcaagtgaccacagggtggaaacattgggtctggtaaccnccacncttnccgggangngnatngngggaacctgggattggctttaaaccctggggcttaaggtcattttaatnttcccttgggggccccttaaactttttt

SEQ ID NO: 1085 - DNA, 455 bp, Mus musculus
  misc_feature (1)...(455): n = A,T,C or G
actgaggtgcaaagaaatggctggaatggaggaaagagatcgagttgctctcggacatagcctactttggcctcaccacaattgcaggctaccagacccttggggaggagtacagttgggatcatccaagtggacccatcccagcagcggtgtgccctccaggctccgncgtgcagcgctggttgcactgcatgcttgtcttgccctacctgctagacaaggcactgctgcccctggagcaggagctgcaagccgatggcgatgctccccgggcttcacagggcagtctgctacctggaggacgcagccgatcaggggcacggcgctgggtgcgtnaccacgcagccaccctgactgaacaacagaggaaggccctccagcggncagtcttcatcctgaaacagggcttngcctgcctccatngggntccangtggcttggttttatattcatgg

SEQ ID NO: 1086 - DNA, 162 bp, Mus musculus
  misc_feature (1)...(162): n = A,T,C or G
aaccttgactggatcacnaaactgannccgagatcctttactcctntnccnacaagtctcttcctctgcaaaaaacgcggggcagaatggaagtaacaaactctgacaaaatacagcgacaatggaggaagactctaaaatacccctgaagcttgacaagag

SEQ ID NO: 1087 - DNA, 359 bp, Mus musculus
  misc_feature (1)...(359): n = A,T,C or G
gaactgaggatgttgtgttcagtggcttacaacagggagacatccacctcaaccagatcgatgctgaggacccagaggnctcangagganctanntgtgaaacatnacccactttanctttgtcnaacctcagtttgagatgccgatgccancccttcntccctgggggtcttccctccgagtttncgggngttgcccgcccccctnccctggagctgntttgacctaaattgaaaanatttttcccnngggggaggggngcggcctggnctttagaatcnccaacaaggggganctnganggaaaaaccttgnaaattcntattggncnccccctgggggcnacattttttggattaa

SEQ ID NO: 1088 - DNA, 216 bp, Mus musculus
atactgaggcttccacgactacccccatgccttcccttctgactcctctgacagtgagtaccgttggcacaccgactctaccacgttcttcactgactgagatggcatggttgcccttggcctggcttgtgagtagaagggtgtccagggccacccgccttagccaggattaaaagaaccagagatggaagctacaaggaagctgaaaaaaaaaat

SEQ ID NO: 1089 - DNA, 438 bp, Mus musculus
  misc_feature (1)...(438): n = A,T,C or G
cgcgaggctcctcctcctnctnctattgntccatctgtnctncctnncagncgtcaccggtgnntcnatgcnacncctcacgaaggggcntnagctggattcaattcgnagagcgaacntangggancttcttccacgtctggataattgaaaggngantaccttcaggccattaanccnganntgactcatatatnncaaaatgnngctctctcttctggaacgcctggagaaaaacaacaancntnccagctcccaagaaggcaagcctgagctcaaatttggcggcaagtccagaggcaagctctggccattcatcaagaaaancaaggtactgaccatttggaccctgngtgggctgnaagctacagatgcagagnctcagagtntatnttttggtcttaatcaaactaagatctggacttccagagagcgaga

SEQ ID NO: 1090 - DNA, 195 bp, Mus musculus
  misc_feature (1)...(195): n = A,T,C or G
gactgaggtccactgggantcaagatgactggagtcaagattanctananggantccagacgtgnaaggtnaagaatangaactcagcataccacgtntaacccacatggatttatcttggaggtaatgaagagacaactaaaaaaacgcagaagtggttttcataaatgaaatagtagaataaaaaatagaaaa

SEQ ID NO: 1091 - DNA, 306 bp, Mus musculus
  misc_feature (1)...(306): n = A,T,C or G
actgaggtccgtctgcagcacatcgccaatggcatccagttacncgccagttcttatgccatggttaaatggcgggacccatgaactannncntggaatggtccatcactccattttaatctagggaagaggttctagtctgtgttttttcacaaaaagaagacagagngcgatnggctgatggctgcctgaaagactgngttcatcaagtggacacagatccctgaatctttctaggggaaantgggggggctccctcatccttgaggctggcttgatngcanaccctctgtctccactggaggt

SEQ ID NO: 1092 - DNA, 145 bp, Mus musculus
  misc_feature (1)...(145): n = A,T,C or G
aaccagatcgatgctgaggacccagagggctcnnggangnacnaaatggnaaacatganccacttttgctngtccaacctcagtttgagaagccggatgncancccttcaccctgcggtnttccctcncgagtttgcgggtagct

SEQ ID NO: 1093 - DNA, 289 bp, Mus musculus
  misc_feature (1)...(289): n = A,T,C or G
actgaggagtctgcagngctgggacctcaaggacgctctctgttatcaagccacagccccgcccccagcacagcaccctagagagccgagacagaggatgttggcttttgcttttctttccatggttccaattatcttcccagaaagcctcctgaccagcgtacttcccatcagaagcattaagacattattaattaatccttgctaggcctgagatgataatcattgctgtcacatgtncctgtgaaactaatgntgccttacttataaagncccagtgttattaaaa

SEQ ID NO: 1094 - DNA, 105 bp, Mus musculus
  misc_feature (1)...(105): n = A,T,C or G
caggggtaggcctcggacttctcgctgncctggnattcctttgtggnanncantangaggccngnaaggagagccagagtgngatcggtaaaccactccgtgcgc

SEQ ID NO: 1095 - DNA, 156 bp, Mus musculus
  misc_feature (1)...(156): n = A,T,C or G
gtcttttgggagaaccatnacccgaccnaangnangccgccnaggcaatgactttggtacacagnacnggtcancantctatcccacatccgctgngcantagaaagcatcctgagatccnaggaagaataccannaaggttctttcaaagcataa

SEQ ID NO: 1096 - DNA, 155 bp, Mus musculus
gagaactctcaggttcctgttctggccaccctgagaaagtgtgctgagaaccagaagaaaacaagagctgggtgtaacagcacttgggacgcagtgagttccaggctagcctgatctacatagagaaagcctaccacggagaagaaagaaaagaa

SEQ ID NO: 1097 - DNA, 112 bp, Mus musculus
  misc_feature (1)...(112): n = A,T,C or G
gctaagagcactgactgntcttccgaaggtnctgagtnnatatccnttnnccacatgggtggggtnacaaccatccngtaacgaaatcaanangccttctttctggagcgtc

SEQ ID NO: 1098 - DNA, 166 bp, Mus musculus
ctgccctttggtattcaaacgggagccgctttggactgactggctgccttcctcctcctccccctcctcccccttctgcttcagatttatttattatatggtaagtacactgtagcagttgtaggacacactagacgagggcaccagatctcattgtgggtggttg

SEQ ID NO: 1099 - DNA, 537 bp, Mus musculus
  misc_feature (1)...(537): n = A,T,C or G
tctgatagaaaaaggctacagggggggttcgttttgtggtatngtcngaaagaggngaatgaganctttgccattntttnatancacaacagatctgggantgaggnggcagcacccgcatcntnacactgcgatggangcggaggngccctgncncacccnnaggggtacntnatacttggcattnaaacancttcggggacatgtgggtactgcggtctgcagttctgcatctccatgnctagngnggcctgtgcnctggncctctgactcctatggaacatccccnngctgagtgttctgggctacgccactgctctgtgnangttcgcaccttgttnanaataaaggatactnccnccatgganaagaagagggaaattctgcnngntanncctgactccggcttgnggtnggtaccttacttcatntgnccactgggccgggttccctatacanaatgcgtgntnanattattttgngcttttgttancaaagtattgnaatananagaatagtttctttgaaatccaaaaa

SEQ ID NO: 1100 - DNA, 428 bp, Mus musculus
  misc_feature (1)...(428): n = A,T,C or G
cttcatagttcatcttcttgangacacttnttnctgcgtgcactgccgtgggagaaggaggcaaagacgaagatcagacccagagggtgctagaatgcagcatctgacctatcctntggccctgaaggtctgggaagctgagcactgcccataaagatgccagtttctcccccagccaggtctgagtgggtagcaagagcccaaggcatggatgactttgataccagccaattattctctcccgaccacatgccatagctgcttttgccatctattctgaagagcccancttacctttcctcagcaccctgctcttatttgctctttctagagctctagngcatttctcatcctaaagcaaagggcctgggttncccaatagctatnaactgctattggtttnaataataaaaattcccctctcatct

SEQ ID NO: 1101 - DNA, 532 bp, Mus musculus
  misc_feature (1)...(532): n = A,T,C or G
tctctgtatagccctggctgtcctggcactaccttctgactgagtgttctattgctgcgaagagacaccatgaccaagtcttagaaaagaaagcatttgattggggcttgcttgcagttttagaggtttagtccattattgtcatgatagggagcctgatggagtgcaggcagacatggtgctgaagaagtagctganagttctacatctggatctacaaacagcaagaagaaagagtcactcactgggcctggcttgagctcntagancncncaaagcccacctncagngacacncttnttccaaanaccacaccctccaacaaggccacnccttctatccttctcaaggagtgccactccttaccgactgaagnggaaacttccaggnnctttggaaagncagttatgccatcataggctgntgtgctggggcgcacaggtaaaanattgtgctgnagcanatgtggctaaaaggatgntttgctataccngacntgggaaatgactagtgatggttagaaataatatta

SEQ ID NO: 1102 - DNA, 526 bp, Mus musculus
  misc_feature (1)...(526): n = A,T,C or G
gactgagagtctacgttgtttgctgacttggctatttcacagacactgatgatgtgcactttgatgcagcacatgaggcttatgaaaataattttgatcatcttaattttgatttggatttgatgccttgggagtcagacctatggagccccggcagccacttctgctcagacatgaaggcagagccccagcctctttctccggcttcctccagttgctccatctcctctcctcggtccacagactcgtgttcttcaactcagcacgttcctgaggagttggatttgttgtctagttctcagtcccccctttccttatatggcgacagctgtaatagcccctcctctgtagagccactgaaggaagagaagcctatcactggtcctggaaacaaaacgggtatctgccgntctcgctctcccaacttctattatttccattttagacaacttaagttccatatttaaaaggcaaatcttggattaagcttatatttattaaattggcttgcatttaaaaaaaaaaa

SEQ ID NO: 1103 - DNA, 130 bp, Mus musculus
  misc_feature (1)...(130): n = A,T,C or G
tgtgacacatcccactgctgnacccngaggagncacacacgtncacaatttntactggaccagagattatatcggcggnaantnggtcccctnccccttccttnataagtnggtgtcacaacagtaaaat

SEQ ID NO: 1104 - DNA, 243 bp, Mus musculus
  misc_feature (1)...(243): n = A,T,C or G
ggggcgttcctgcatatcncnntttngaccacgnncttcatcngcctcataatctagctgtccaantcnattcccgtttggtgagcggaggcacttcnccaangtggactccaaaggattcggccctttacnattngannngaaatgatggccacacatttgnactcggtctgcctnangaanatggtgacaaactcatggcctgtggggcgggcctctgcctgtgaggtgtcaaaaaacaaa

SEQ ID NO: 1105 - DNA, 367 bp, Mus musculus
  misc_feature (1)...(367): n = A,T,C or G
gactgaggtcattgaaaaacaaaaccggtaactaccanctggatgttnatcacgnctgcgctgagcccacagatncagtnngaggaccagtcttctccaggagcatggcatttntttccattnatttaggtcnctggttnctctcanccgnaccttaccgttntaagggnacanatcttttatacgtnncattaactttcctccatgtcctttaatactaangtaantgggattgtncatgaattcttattttcaagttgntgctaccctacagaaatacaagtgggttttgattgctgactttgtatcatgntacactgctaaattaacttattagctctagtaacttaataaactttttttggta

SEQ ID NO: 1106 - DNA, 118 bp, Mus musculus
  misc_feature (1)...(118): n = A,T,C or G
gactgagatagaaggacaaggacaaaatcaccagcactggctgaaggtacntatgcntgtggnggaatngnnagttgatacatagcgcganacctngancagatatccaacctacttt

SEQ ID NO: 1107 - DNA, 215 bp, Mus musculus
  misc_feature (1)...(215): n = A,T,C or G
ctgaaacctgcttactcaggggtggagcttgccgntcaatcgttctgccacagcncactgcnggagcttgccgctttgctgtttcaaagccannacgngngcacctgcaancttactcctanattattgcggcgggaatcgcgccccttccccctttcttcatannagnagtgcttggaatagtaaaaattgnaaccttgagcagaaaaaaaaaa

SEQ ID NO: 1108 - DNA, 155 bp, Mus musculus
aactggcagacttactgctaacggctctggcggactagtgctaacaatgtggcaacaaaacatcaagaagcctggcatggcaggggatgggcttcccccctttataagcacagactgctagtaaacattgagccttgaacagggaaaaaaaaaaa

SEQ ID NO: 1109 - DNA, 184 bp, Mus musculus
  misc_feature (1)...(184): n = A,T,C or G
aatacttaactgcttnttagagcagacaagctntgttcctgatgaatactggcngtccctcnnagttgcacaccgcatggtnttcacatatcctttatggttancttttccactctgagtgcgtcttcatcttanganctcagttcatagattatatnttttcagnanttctttgaataatttc

SEQ ID NO: 1110 - DNA, 162 bp, Mus musculus
  misc_feature (1)...(162): n = A,T,C or G
gagtggaactgggcgacttactgctaacggctctggcnnnctaagngcttacaatgcgnncacaaaancatacanggaagccttggcatggcaggggatgggcttcccccctttataagcacagactgctngtaaacattgaaccttgaacagggaaaaaga

SEQ ID NO: 1111 - DNA, 160 bp, Mus musculus
  misc_feature (1)...(160): n = A,T,C or G
tagtggaactggcgacttactgctaacgnctctggcngacnancgctaacanngaggcaacaaaacatcaanaagcctggcatggcaggggatgggcttcccccctttataagcacagactgctagtaaacattgagccttgaacagggaaaaaaaaaaa

SEQ ID NO: 1112 - DNA, 166 bp, Mus musculus
  misc_feature (1)...(166): n = A,T,C or G
cctgaataaactgccagcctggcancctggaatgactccangcaccaagagtngaactggctganttactgctaacaggcgtntgnngnactatttgctaacaatngcgcgcaacaaaacatnaataancctggcntggcaggggatgggcttcccccttttataa

SEQ ID NO: 1113 - DNA, 145 bp, Mus musculus
  misc_feature (1)...(145): n = A,T,C or G
gagggtggggggggggtngggggantggagggtnaaaggaancccaggaggcctaagattnacangcccacatnttccanactgnccttntcattttcagtgccattgtggcaggaccacaacaatgctcatagtggcacacagg

SEQ ID NO: 1114 - DNA, 139 bp, Mus musculus
cctgttctggccaccctgagaaagtgtgctgagaaccaggaagaaaacaagagctgggtgtaacagcacttgggacgcagtgagttccaggctagcctgatctacatagagaaagcctaccaagagaagaaagaaaaaa

SEQ ID NO: 1115 - DNA, 523 bp, Mus musculus
  misc_feature (1)...(523): n = A,T,C or G
gactgaggttcttcaagttcnacttcgactggagatgtcacaaggtcgtcatgcctctgaagactctatgtgtggatctgtanccaaacaatggattngcagnttgctgagtggaaagtcaacacaagcacaaccaaggcgcacaaaaggaagatgcattgcatgcgacgagaaaggagttccaggagttatttccaaagcaatgtggctactcaatcaaagcaagaatcaaagtatctttcgggaaatgtacctgggttcttatagtactgaagttcttatatgaaaacatagtaggaagggacatattcctagaatactcagtttttaaggttatagttgcaagagatgtaaaatatgcttcttttctatcaaatggtataaagcttgtgtttgggacagggaattcaaatattttacctcccctaccttgaatacttttatacaaatattataatncccacacgantacccannaaaaaccctttgtttacacaaaggnccccntgctattattccagga

SEQ ID NO: 1116 - DNA, 139 bp, Mus musculus
  misc_feature (1)...(139): n = A,T,C or G
tggcgacttactgctaacggctntggcggnctagngctaacantgnggcnacanaacatcaagaagcctggcatggnaggggatgggcttnccccctttataagcacagactgctagtaaacattgagccttgaacagg

SEQ ID NO: 1117 - DNA, 178 bp, Mus musculus
  misc_feature (1)...(178): n = A,T,C or G
tatgactccaggcaccaagagtgnaactggcgacttactgctaacggctctggcggactagtgctaacaatgtggcaacaaaacatcaagaagcctggcatggcaggggatgggcttcccccctttataagcacagactgctagtaaacattgagccttgaacagggaaaaaaaaaaa

SEQ ID NO: 1118 - DNA, 156 bp, Mus musculus
aactggcgacttactgctaacggctctggcggactagtgctaacaatgtggcaacaaaacatcaagaagcctggcatggcaggggatgggcttcccccctttataagcacagactgctagtaaacattgagccttgaacagggaaaaagaagaaaa

SEQ ID NO: 1119 - DNA, 256 bp, Mus musculus
  misc_feature (1)...(256): n = A,T,C or G
gactgagggagttctctttccttatttnctcttactgtgtggactgaggagtnggntgtggaacanagcatggagcccanggaccangaggagataagaccgncnataaaaagcttcctgatgaacaccacgccaaggaagaaagatgccttccaagatcactggggtctncagggcccaggttttgaccctaaaaaaattcctgtaacaattttatgccatnaaantttattttgtanatgcatttttttcccct

SEQ ID NO: 1120 - DNA, 232 bp, Mus musculus
  misc_feature (1)...(232): n = A,T,C or G
tgcttccacaccagccncatatacttcatantcncnatggcctnngnggcgcacctctggnganccctcactttgctgctgtaccattctctcttgaacccagacagagctgcgtgaaggaaaatgcaccacagacttccttcagaaacaatgntncctcangntntgggcacancanctaagacctanncttgtangccttattaaaatgtgattcctgtggcggctataa

SEQ ID NO: 1121 - DNA, 298 bp, Mus musculus
  misc_feature (1)...(298): n = A,T,C or G
tccatactttaaagaccaggctctgtttcccgtgcttgtgacctctgacctggaccagnatctgaggcgggaagctctgnctgtctatgtttttgatgangaanacccagagcctggctcctatcttggccgagcccaggtgcccttgctgcctcttgcacaaaacaaatctatcanaggtggggcgnttgcacccccctggccctcttcctgcatcatctctctgaccttaccaacttttctttgttnactngcttggaacagncattccttcnagtaaaaatattattatgcatta

SEQ ID NO: 1122 - DNA, 149 bp, Mus musculus
  misc_feature (1)...(149): n = A,T,C or G
gactgaggttgactgacttatgtgcgctttggcagcctggagttttcttgccctctgccgacgggagcagagcctctgctggtgttgggaaaagcaggccgaatgaggcagagaagntnaccactgtctgnaaagcctacatagagcag

SEQ ID NO: 1123 - DNA, 460 bp, Mus musculus
gactgaggcttcctggatctcaatagtgccagctctgtggttcttcaggtcctaacacaggccaccagtcaggatactgctgtgttgaagccagccgaggagcaactgaaacagtgggagacacagccaggtttctattcagtgttgctgaatatttttacgaatcacacccttgatataaatgtacggtggcttgctgtgctgtattttaaacatgggattgatcgttactggaggcgtttcgcaccgcagtcaagcctgaatttaagagcagattcattgtgaagatttgctatatggactgattgtgtgcacagtgcatctgtgaagtaggccacatggccttcccttcgttgcaggacctggtgccttcttctacagccaacacttttgtttccgttttctgtgttgaagatttttcaaaattaaattcacatgttgttactattttgtaaagaca

SEQ ID NO: 1124 - DNA, 498 bp, Mus musculus
  misc_feature (1)...(498): n = A,T,C or G
actgccagcgagagaaccgagtgcntntcatnanccantagccnatnncaacctaccnacctgnnactgnttaaagngnnntngctnnnnagagnngntntgancnncacgactatgnngnatnngatnancntatncacccgncncannanncatatacangagntgcttgnnngctcacagcccacacctctgtgttacacagtccagtttaaagggtcctcttctcgcctttctttgtctgctttggagcagcgtgacgactgcctctctgtagctaaggaaggtcttctgctcctttctgactcagaacagcagagaaggctggagggaggtctgctgtgtcaccaaccacaaggtggtgacccaagagtgcacatcagcattcccaggggaaccaaaagactgcctgggccaaaggagtaagaaatgcccgtattgtatccacgtgtttccctagaaaccctgacggggaggtttgcaaagcaagtctacaga

SEQ ID NO: 1125 - DNA, 174 bp, Mus musculus
gactgaggaacctttaaaagtaggaccagcaaggatgactcggatctcgttatgtggctctggaactcacagagatctgccttcctctgcctcttgaatgctggttaaaggtaccataccactgtgcctgacctcataataataaatgtagtgggtgagtctgaaaaaaaaaaa

SEQ ID NO: 1126 - DNA, 348 bp, Mus musculus
  misc_feature (1)...(348): n = A,T,C or G
gccgtcggagtttctgganccctgangctgtccttgaggctgcntttacagaacgagtgnnnatgagatgangntagcnnaggctgaggagagtcaggtccantgcaangnnactcannncttgatgnatggtgccannaaaaagctaatagtnactccngagagtatgangactctcagggaacatagngnaantananggtnggggagttgttaaagtgannacaaccagaatccttanctgngcacgcgactacaatcccaattcttgggaggctgaggcagggggatcaagagttcaaggctggcatggggcacacagtgagaacctgccacaaaaaaataaga

SEQ ID NO: 1127 - DNA, 128 bp, Mus musculus
  misc_feature (1)...(128): n = A,T,C or G
cccccctacttagctaancanacctatgncataaaaangtaattnaaaccaagaaaaataaatttaacacgntggcttttgatgtccacatttgagttgaggtgtgancccccctgcttagctaaaca

SEQ ID NO: 1128 - DNA, 105 bp, Mus musculus
  misc_feature (1)...(105): n = A,T,C or G
gactgaggaagcaggctgagggctgagggaggcaaaggggagatatgaatgtgttccgaaggtttnccggtggctcatggnatcctccaaaggcctgtctgcgat

SEQ ID NO: 1129 - DNA, 122 bp, Mus musculus
  misc_feature (1)...(122): n = A,T,C or G
agactgagaaagtagatgtaagctctcagccacaggatcctgagccatgcctgcctgcctgctgccatgtctactcaccctctgtaagccnnaaataaactctttcttctataaaaaaaaaa

SEQ ID NO: 1130 - DNA, 135 bp, Mus musculus
  misc_feature (1)...(135): n = A,T,C or G
gctccacatctccctaccacgacctgcgacgtncnttacnntcaaaggacnnacaggnggcnnggctggntccntatatctactgcctcgaatcgatgaattcgagctcggtacccggggatcgaaaaaaaaaaa

SEQ ID NO: 1131 - DNA, 203 bp, Mus musculus
  misc_feature (1)...(203): n = A,T,C or G
tgcagctactgactatgcgcacagggganctgtctctgntcactctttctcaatattcactntagttactgtgcctgctntttgaaatgaggtcatctctgnagnctttgctgtcctgnaactcagtctgtagaccangctggcctnaaactcacagagatcccctcgcctctacctcctgagtgctgggaataaaaaaacaa

SEQ ID NO: 1132 - DNA, 290 bp, Mus musculus
  misc_feature (1)...(290): n = A,T,C or G
agatacaattttgacangtggnggtggcccacgcctttagncccagcacttgngaggcagaggcaggtggatttctgagttcgaggccagcctannttacccagtgagttccaggacagccagggctgcacagagaaaccctgtatcgaaaacccacantnnnaccatnaatnaatggantgctgtccaggaacngaaacattcantggnagagccggacttacccttatccngggaacccctatcactcancgcttntcccacagtgcgtgctattatgatgccaatca

SEQ ID NO: 1133 - DNA, 229 bp, Mus musculus
  misc_feature (1)...(229): n = A,T,C or G
agactgaggctgacaggggccncaggacctgcgcaggctnggaacgcatgctaccacngagcacatgccagccctccctngactntnatttncttttgtaatatatattgtatacaaaagtacaactagcagatgatgagggganntnccnaagangcctggnggngaggancggncctgggccgcttggntagccncagacgggcgtgggcttccagcactagcacac

SEQ ID NO: 1134 - DNA, 398 bp, Mus musculus
  misc_feature (1)...(398): n = A,T,C or G
agggacgctaatggcattctccagatgtggtctcaggaggnacngcactgnagtgngaagctggttgtaccttggattgcatctacctgcctttgnacttganatatagacnccaagctanggcttcctgctaatctggaaagatgaatgtgattggtgcatcaagtcagtcggaaacaaacatncggttacctcagataaggactcaagaaatgattctacacaagtccagatcatgagctgttgagtgtgttggggttgcctacaggagcangggtgactgacagctgagncactgnatagccccgtccnctcatggacagggtntctntgcgtanccttgnctganntggaactcactctgtncttacaggctgacctcgaactcacagaaatca

SEQ ID NO: 1135 - DNA, 169 bp, Mus musculus
  misc_feature (1)...(169): n = A,T,C or G
tgctccattcctcatgacggagtnagaggnacaaagagagccnattctaatgatnnctntgaagacatggaagccagacgaggatgagtttgaagatgaaacaagacctgccannggaattacnatctactagnaagcnacatgaagccacggtatacaacctgaattt

SEQ ID NO: 1136 - DNA, 259 bp, Mus musculus
  misc_feature (1)...(259): n = A,T,C or G
acacaatttttacagaantctttnagngtcaccttattgacactcaggagcacacaggtgatcaccatgagcttaacatgtgcagatgacatgatgnccaagggctgatggctgtggtcaggaacaggctgtctccacttcttggtctggncttcacactcttttaacctgggtaatgtctctccccagaccncttcattctatggtgnagttacaatcacccttcagacttttcttatactaaatagggaaaaattgg

SEQ ID NO: 1137 - DNA, 259 bp, Mus musculus
  misc_feature (1)...(259): n = A,T,C or G
gactgagaacttgacttgncctgttccttctgacctgtcctcggatggctccacagatgctggacagcaaggaaagagccaacgctcctaagactggacaaacatcctcacacccactcctctaggttccccagagacgtcgccccaacgtcagcatgaagcagccagataccatgatgagcctactgctcttttgccatcaccttttctaattttttctttttttttaaactaaaccaaaatgggggaaaaaaaaaaa

SEQ ID NO: 1138 - DNA, 117 bp, Mus musculus
  misc_feature (1)...(117): n = A,T,C or G
agcatactcagtcctgctgaancaagcaacagaacccagncgganacaaagggatgggtccttgggttttcacacatttattgagagctgtacattaaacattgagccttgatcaga

SEQ ID NO: 1139 - DNA, 309 bp, Mus musculus
  misc_feature (1)...(309): n = A,T,C or G
atcatctttgggaacatgctntaaacacnntnncaccntgccttccttgnacgaaccnntaannggnaagctgagcatcaccaacctccgagcgggcaagagagaagagagaaaggacacttgggtgtggtccggcatcatgcttttgcatcgagagctggggcctgggtggacaatanccccccccctggcttccccaggctttnccaccaccaaggttttctgctggagnngggagattcccttaaanaggggngnccggncttntttttctccaaccccccatttggtttaaccttaatctttgcc

SEQ ID NO: 1140 - DNA, 147 bp, Mus musculus
  misc_feature (1)...(147): n = A,T,C or G
actgagagatggcattccctgtggntttgctggataactgcacanctnatactatnaaagacaatgtctnagggttacactgngcagnctatggtagnggngaccctgaacntccaaagagctantctantctcaacattccgatga

SEQ ID NO: 1141 - DNA, 195 bp, Mus musculus
  misc_feature (1)...(195): n = A,T,C or G
ctactctccccctaacttgaccatcngaatgcattacctcttccttcaaactcggatttttatttctaagaggnaaancnttatgttaggggaaaggcagggtggctttccanatntgcatttntatattaaaattacngtgangattcgggacncataaaaataaancnggccttgggccctgggcgctctgct

SEQ ID NO: 1142 - DNA, 109 bp, Mus musculus
  misc_feature (1)...(109): n = A,T,C or G
agctggtatacattcagcanntttgccctcccaaggactctcncatgttccttgttcctgtntccnctacggtgcttgnganggcaggagaatgggcctccctcacggt

SEQ ID NO: 1143 - DNA, 444 bp, Mus musculus
  misc_feature (1)...(444): n = A,T,C or G
gaactgagaggatcacagatgcacaagcatggcnggagaagcagcntggttaacntganngatgctgctggccgnngcacagaggtgggatncctntggnanggccnnnctcgtnatccacctgtgnactagatttgagtannagcacantctgaagaggatatttggacacagtaccagtntgataacngaggaactctagcgaccntttacttcnggacacngcacgctnatcnnattcttcatngccctcanagggaccctgatnaagtngactnanaaagacagntctgaacctccacntaagaggcttttgtttatcctctgaggatnatcaaagcnttgangacgctaccgccatgcatatcagtccgtggcactcccaccgtangtctgttaangganttggacttttagctttgcaaagaagccatttggggattt

SEQ ID NO: 1144 - DNA, 243 bp, Mus musculus
  misc_feature (1)...(243): n = A,T,C or G
ggaagtggacgtgggcacttacgaggaaacnaatcanatntgcgaaccgtgtnggcacacatcgttcagttcatcaaagttctagggaggcggaggccggtgaatctccatgaattcaaggccaagcgtggtctacataaggagttccaggccagccaaggctacatagtggagaacccatcttaaaacaaacacaaaacaaagggggcaattatttattattaaaagtgtcaaaaaaaaaaa

SEQ ID NO: 1145 - DNA, 205 bp, Mus musculus
  misc_feature (1)...(205): n = A,T,C or G
actgagaaggatgacgcggcatggcaagnactgctgcgcantngnggctactttgtgctgtntanagactgnctcagaataagagaaacaatnatntacattcagagtccttaaatctggatgccntcttnnggagtagtnatgaagacagcnacagtgaacttacattaaataaataaatcttaagaataaaatgtccatagac

SEQ ID NO: 1146 - DNA, 190 bp, Mus musculus
  misc_feature (1)...(190): n = A,T,C or G
catcaaagcacaaaattaaagcagcaaaggcanaggagcagaacanaannggaagcgtaaccgcnntgngtganatcnagagngaagatggagatgnagagatnttactgaaaagtgggaaggagaaaccacaaaacanatatngaanacttacaaattaaanaagtacagaatgaaagaaaaaggctgg

SEQ ID NO: 1147 - DNA, 119 bp, Mus musculus
  misc_feature (1)...(119): n = A,T,C or G
gtaaaatcaagccaaattaaagcagcaaggacaaaggagcagagaagaaaaagangcntancngtantgagtgagancaagaaagaaaatggagatgtacagattttactgaaaagtgg

SEQ ID NO: 1148 - DNA, 248 bp, Mus musculus
aaatggattgctgatgtatccgtgaagtggatggagctgcctctgctgacctgtgaactgaactgctgatttccagacaacacagatgggagttgctccaaagagcctttcgaaacaggttcacttccccccatatcctttctttcccactacctctggtgggtggtgggctaaaagggatgttaaagtgtttaagaaccatcattaaaaataagttttgagggctggagagataccccagcagttaa

SEQ ID NO: 1149 - DNA, 199 bp, Mus musculus
gactgaggcatggctgagctgctacaaaggggagagtcccaaagttcaggattgtgaactgcatgtgaagcactgggatggccaggagccgagtatgcagcaggaattgttcatcagcacatcataccaaagcttgaagatcactcttacaagacaccactcaagtgaataaagtggcctttcattccaaaaaaaaaaa

SEQ ID NO: 1150 - DNA, 188 bp, Mus musculus
  misc_feature (1)...(188): n = A,T,C or G
gactgagatactatcanngacttaattaaaggagaaagacaaagagagagagaaaaagaagcatannttatgatgngacaccnagaaagaaaatggngatgtaaagattttactgnaaagngggaaggngaaacccaaaacnaatatngaagacttacnaattaaaaaagtnaagaagagaaaaaaaa

SEQ ID NO: 1151 - DNA, 117 bp, Mus musculus
  misc_feature (1)...(117): n = A,T,C or G
aggccttgactcccttgtgtgngacccngagggaacgananannatagatnccgntgatacacttgcccnnatcccttagagggtcaaaatgggtcccgatgagaacctgagtgtga

SEQ ID NO: 1152 - DNA, 134 bp, Mus musculus
  misc_feature (1)...(134): n = A,T,C or G
ttaatgctttatttaccctgtacgacacccnaatttattcttttntggngcngggtattaaatgcgancaaaagtagaantntgccctccggattttgggtttnanaccccccccccatgaaaaattaaaagat

SEQ ID NO: 1153 - DNA, 157 bp, Mus musculus
  misc_feature (1)...(157): n = A,T,C or G
tgctggaaggtggggncacatgcacttaggattcgagagcgatngtcctgcaatgggccacattagaaaggtggncctgctcanaaaaagangcttggnngagggagactcacccaggccancaggggactngttagggacttttacccaggaagca

SEQ ID NO: 1154 - DNA, 397 bp, Mus musculus
  misc_feature (1)...(397): n = A,T,C or G
tctttctttgcttgttgcagtggacaccaaagcaggcaccaaagggttaanaaaggaacgtcantagnggggggatgantatagaaagcatcagtggntgctcctcatcacatgtctatccctgcttcagagagagagatgtngncanactggcnggttggctgctaggagaagganactgnccnccangcttcactctccttgtccactgtgcccccaccaccccctggagnnggggctgnaacggttgagctccttgaagtcccctgaaaagaacactactcagcttctaaaagcatgactgccgtnctngntgtngaccggncccagggtgncagantcaagancccccattgggaacaaagcttggctngnacgccncctcaaaggcccaagg

SEQ ID NO: 1155 - DNA, 191 bp, Mus musculus
  misc_feature (1)...(191): n = A,T,C or G
catatgtagtctttctcccccagcctganacctgnttgctcggngnggancttccngctnattcgttctacgngcgcccactgctggaacctgaggagccacacactgtncacctttctactggaccannanattattcnggcgggaatcggntncccctcccccttccttnataactagggtccggaaca

SEQ ID NO: 1156 - DNA, 160 bp, Mus musculus
  misc_feature (1)...(160): n = A,T,C or G
agccattttggagatggcnttgtcatgggacgactgccanggncagnngccatagangggagcaatccagaggtcantnntnntgcatggcctcagttcctgnctccagatttcttgcctngagngcntaccctgacttccatggatgatgaactacagc

SEQ ID NO: 1157 - DNA, 203 bp, Mus musculus
  misc_feature (1)...(203): n = A,T,C or G
gactgaggtggggtctttncccggntgcagttgaaatcggaggcagagagtgttttctgggttcgcgttctgcacggcctggatctgaacggaggctgctgcaccttcggggctaggagtttgggaaaattcaaggagagagactcaatgcatcttcagcaggagcccttcagatggctgtgtggtgaacaggaaaaaaaaaa

SEQ ID NO: 1158 - DNA, 275 bp, Mus musculus
  misc_feature (1)...(275): n = A,T,C or G
actgaggttccagaagtccgtcaanangctgtttccctataaggtgctgaaagctctggatccagaaatctatcaaaatgtggaatttgatgctttggttgnacagtacaaaaaggtattangtatcagcagngatccccttggaatgcttgatcgaatacagggangataattttggcaaggttattttctaataaggatatggtttcatncaaactaangaagttgtaaagacatggaanattacataatttcggncctgttcaaaaaaaaaa

SEQ ID NO: 1159 - DNA, 228 bp, Mus musculus
  misc_feature (1)...(228): n = A,T,C or G
ttctctgtgtagatctggctgtcctataantnncagatncncctacctctgattcaaaggactaggatnanatgcccggttaaagaagatnctccagggctggagagatggctcagtggttcagatcacagactgctcgtccagaggncctgagttcanttcccagcatccactaaggtggctcacaacacctcttntggngtgtctaaagacagcaacagtgtattc

SEQ ID NO: 1160 - DNA, 123 bp, Mus musculus
gactgaggttacgggaagtttcaggagagctgaacaagtacaatttgaacagcccccacctctgaatgtactggagcaggctactattaaacagtggtggtggtggggacccaaaaaaaaaaa

SEQ ID NO: 1161 - DNA, 234 bp, Mus musculus
  misc_feature (1)...(234): n = A,T,C or G
accattgaggtctcaaagagcccaaggaactgcagtggcctcttcannagcccggaagggcatgatgctgctcttggatggctcggtgctgcggaaagagcatgtcagagctagccncctgacttggacctagcctggnctcccccaatgganccagngaacttcccacncataagagaaacaacggtnttttaaatnntnatnnctgtcnccttgcgccaagccaggtggggg

SEQ ID NO: 1162 - DNA, 425 bp, Mus musculus
  misc_feature (1)...(425): n = A,T,C or G
gactgagccctagggaaaaagcagtcatatactgccatgctttcttcaacgccagtgtgctatttctgaaggcctacaccgtggattaacaagatccctaaatggacccaaaagaaaaccgcactagaccagaaacccagtgtgtggacgctctggaggagaattggcaggaaacctcggggagagcctctcgccaccgggagcctccgcccgtgtttccttagctcccgcctcaacaagcccattggcggtcgggcggttgctagcttcctccgcaactagggcgggccggaacttttgtctgccggaaccggtgtacgccgctcagtgttgtcgaccggcgtcaaggcgacgagggtgctgttctcttcctccggctgcggtggctgtggagttcancccagccagtctgggtaggagcacag

SEQ ID NO: 1163 - DNA, 193 bp, Mus musculus
  misc_feature (1)...(193): n = A,T,C or G
cttggctgtggaggaaaataaaaactgagcaggaggtggtggagggantggatatctctactcgctccaaagaatcctggtctctnangagaaaaacggccccgaaacgggaagttnccccagccctcccatttcctnccaatgggccattcgccccanggactcatnccangagcccccattaaaaaaaaaa

SEQ ID NO: 1164 - DNA, 224 bp, Mus musculus
  misc_feature (1)...(224): n = A,T,C or G
gactgaggtgagtgtgaccgtcgcacactacgtgcagctttacaaccccggcaaagcaataaggaaaacagcaggctccaggatgtagcccttatgaggtaatcaatcattacaggagcgactcagtggacttaccancacngagctattattctggaagtaganctggngatgagggcacatgacgttnctgttggnncggatgctnggagaggacacgccca

SEQ ID NO: 1165 - DNA, 125 bp, Mus musculus
  misc_feature (1)...(125): n = A,T,C or G
aggagatgaaggaagtnntggaggaggcacanaatgnntgatangcncctnccatggnaacgctnagaangangaaaatggggagcaggaggctgccttgaggtagatgaagaagaggaagaagg

SEQ ID NO: 1166 - DNA, 524 bp, Mus musculus
  misc_feature (1)...(524): n = A,T,C or G
actgaaaaagatgaaaaggaatatgcacttaagcaaatcgaaggcacaggaatatctatgtcggcttgtagagagattgcacaaccacagtgcatgttctcaagggtgagcaggaccacatcctgctacattcatgcatcagggccttgcccagccatcgtcanagacacttcttccttcagtaaatgggaaacagagaccataagtgaacagngtgcanagngggagaccttggaacactctactaaatgggatgtcttcatcatcccctcccctcatggctcaggggatccttcaaagcaggcanaaagagtgtaanagccagaggggatggagaccaccaaagaaacaagggcttntaaacacagaacgactgaagcactcatgaactcacagagactggcagcatgcaccgggcttgcacaggtctgggtctgatgggatcccagtgctgggaaaagaaagtggaccccccccatcccaatccaaaaantatttccanaanaaactggttccttaaaagg

SEQ ID NO: 1167 - DNA, 174 bp, Mus musculus
tcatcatgggacgactgccaaggacagcagccatagagaggagcaatccagtgagcaatactcctccattggcctcagttcctgcctccagatttctgccttgagttcctaccctgacttccctggatgatgaactacaaagttgtaagataaaataaaaccctttctttccca

SEQ ID NO: 1168 - DNA, 270 bp, Mus musculus
  misc_feature (1)...(270): n = A,T,C or G
gaactgagattgctgccaggctatgggtgtcccaggnnctgacaggaccacacctgtgctgnntttaanaaacttgctgggggctggcagagatggctcagtgngntaagancatcanctgcttttcctganggtcccgagttcaaatcccagcaaccacatggtggcntcacaaaccacccgtaaaagaaatctgatgccttcttctggaagatctgaggacagctacagtgtacttacatataataaataaatctttaaaaaaaaaaa

SEQ ID NO: 1169 - DNA, 276 bp, Mus musculus
  misc_feature (1)...(276): n = A,T,C or G
gactgaggttctccanggagngctcattggccagggcanactgcatagtacanntcnnnatgaacnatgncccnctgacngggggcngnagaatnccaatggcaagactgcntcgcggaggccggangataaggaggctgncgagatctgaatctggctcaggcgctgtaaatagtctgacaaatgttcggcaccgcctaaattaccctttatatttgctgatacaactcatcttttgtagttaaaatttctattgtttggtcctaaaaaaaaaaa

SEQ ID NO: 1170 - DNA, 480 bp, Mus musculus
  misc_feature (1)...(480): n = A,T,C or G
cccacatgtgatgccgctggccngactcaacangaaagcaagcananaattgccancgctacaacaaagcacaacagcaaagccaggcattgcctgctaatgcttctgacatcagcactcaggaagctggggcaaagacggccacttcaagaccagcctagacttccttcacaggtttcccaaaggaacgaccatcacatgtaaatgaacactgcagtaaagcaacacggaggaccacccagctctgtgctcagaagaggatgcagcatacgaccagacacttggtatagaaatgattccgggctggtgagatggctcagtgggtaagagcacccgactgctcttccgaaggtctggagttcaaatcccagcaaccacatggtggctcacaaccatccgtaacgagatttggcaccctcttctggagtgnctgaagacagctacagngtacttacatataataaataaataaatcttaaa

SEQ ID NO: 1171 - DNA, 201 bp, Mus musculus
  misc_feature (1)...(201): n = A,T,C or G
accgggtgacaagccctcatcctccngcatatncacttctcgctcnttctggtacttttccgnactcnnaatcttnganctcactgggggagtngccgccaatctgggaagaagtgggtagtgaaantcancaggaccctggcccggcttgaaggctttctgagaagggaanggctggccgctaaggggggaaggggaatt

SEQ ID NO: 1172 - DNA, 235 bp, Mus musculus
  misc_feature (1)...(235): n = A,T,C or G
gcccagaggtaagcctcccagtttnagagacttnaggnattttnnagatggcntcatcatgggacgactgccagggacagcngccatagagaggagcaatccagnggagcaatnctnctncatggcctcagttcctgcctccagatttctgccttgagttcctaccctgacttccctggatgatgaactacaagttgtaagataaaataacccctttctttcccaaaaaaaaaaa

SEQ ID NO: 1173 - DNA, 230 bp, Mus musculus
  misc_feature (1)...(230): n = A,T,C or G
acccctccaacccacttcacacagggttgggaaccggccaagggcagcaagagaactgaaagctgggtngaccagccctgagcccaacttcctncctttggttntatgggtcaccactcccttgcttaccggtngagctttnttcccaacccgggttttttgncccccatttttgaaggattccgcttgggaaacagggccaaagngcccccttttaaggcttcccaaaa

SEQ ID NO: 1174 - DNA, 231 bp, Mus musculus
  misc_feature (1)...(231): n = A,T,C or G
atgaggttatggtggaactggcatgagaatgggaagaaagcantggtcaacaaagatgacattcanaagatgaacccaccaaagttctccaaggtggangatatggcagagctgacatgcttgaacgangcctntgtcttacataattngaaaggaccgctactattcaggacttatctntgcntactctggnctcnactntgtgngnnngacangcctacaagaaacctc

SEQ ID NO: 1175 - DNA, 435 bp, Mus musculus
  misc_feature (1)...(435): n = A,T,C or G
cagaaagattgtaagagccanaggacccagaanatgtgtgtgcagagattgtgtcttctagaaatgatggggactgcttcacccatgttacccaaacagtatggtttgtctaaacaagacccgaacannaacatcaccaacagacatgccaatatggaaaggaaatcccctggagtccctaagaactacagtcggcctcggaatgttgggagtgggaggagtcttgtgtctcacccagggatgagcctgctaacggtttatccaataccaagtgctcagctctaaagtcaaacatacaaacaatagtctcttatattgcttnangngnctctcttatgttattccaagcttattgtaggtaactacacaaagcaattctactgacttatatagngattgggtttccaaggtcacagaacataacataatatgtaa

SEQ ID NO: 1176 - DNA, 215 bp, Mus musculus
  misc_feature (1)...(215): n = A,T,C or G
acacacttggcacctttgtactaggaccancatattattganganggnatcggncnccctccnncttccttcataactnnggggagcaacantaacttcatgagccttgatcactagcctnacaaatttantgnctngagnngntaccctgacttccctggatgatgaactacaagttgtaagatnaaataanccctttctttcccaaaaaaaaa

SEQ ID NO: 1177 - DNA, 102 bp, Mus musculus
  misc_feature (1)...(102): n = A,T,C or G
cagctacctccccttactgcccangtccanccgngcccaacaagatcaaagttgtgtgccagatgcccagagcccantttnagagacttcatcattctgcag

SEQ ID NO: 1178 - DNA, 178 bp, Mus musculus
  misc_feature (1)...(178): n = A,T,C or G
actgaggtgcctccgtctactgtggagncctggnataacaaggcattgatgtgcggntcctccagaacagagcaggccgngganggantataatgccttggtttgcccaagggggtcaagggtagggagggtgtcttccattttccaccttgctnatnggcgccctacagaggaaaaa

SEQ ID NO: 1179 - DNA, 190 bp, Mus musculus
  misc_feature (1)...(190): n = A,T,C or G
aatgacttaaattttantnacacatttcttctggaatttcgngntggattaagaatcccagnngtnctcacaaatctgcctgtctctgccagccaagagctgggattaagggtgtatgccatcacgccctgcctaggnacgagtnttaataaataatgcaatgttaccccatattaaatactctttaaca

SEQ ID NO: 1180 - DNA, 143 bp, Mus musculus
  misc_feature (1)...(143): n = A,T,C or G
tgagagacccctgcgccatgagaagcgaagtggcccaagtaagagantgcgcangctgaancgcatganaaganagatgagggggangtccaagtcagccantcagtgcncctacngacgcctgtnggagcagaagtgaggga

SEQ ID NO: 1181 - DNA, 261 bp, Mus musculus
  misc_feature (1)...(261): n = A,T,C or G
actgccctttgggattcaaacgggcagccgctttggactgactggctgccttcctcctcctccccctcctcccccttctgcttcagatttatttattatatgtaagtacactgtagcagttgtaggacacactagacgagggcaccagatctcattgtgggtggntgngaccccccaanncnngggacctgnccagngncactntgaagcctaanaatactgtctacgnggtgagcaagcatctggcatctgtccagacat

SEQ ID NO: 1182 - DNA, 404 bp, Mus musculus
  misc_feature (1)...(404): n = A,T,C or G
actgaggacagcttaagacgctccaggacttcttccaaacaaggactacggtccnctgcttacccaacagcatcttcacgcactttcacgtggttcccatggacagcgtaaagcaaaggtgtccctccggttctgcaggaggaaaattgtcttgtcgccaacattttttcagtgagcaataggtcaatcaaatggcttgctacgggacctggncctgtaaaactagcttaaaaccaatattnatattgngngggaaaaccttttttaaacccacaggaaagaaactgggattcattgacactaactttgttcatcctaaaataaagtactttttttttctcccnaatggcttnaataaaagggttttatttcccccaaaaaaaggantaaaatccctataaatt

SEQ ID NO: 1183 - DNA, 118 bp, Mus musculus
  misc_feature (1)...(118): n = A,T,C or G
gagggaagagagcagacntctgactccggggtgctnatctggngtggaagagatcnggttcttcctgactggcttcatgtccctcanggtgtnaatantggcctcttcaagatattta

SEQ ID NO: 1184 - DNA, 179 bp, Mus musculus
  misc_feature (1)...(179): n = A,T,C or G
gcctagtgactccctcattctncatgctnnaaggcgattagggcatatgananacacagtgtcccatgccagtgattctcacntcattacattnttntgtgatgctccggaactgtcacntgngcaacaagaananncgcatnaactttacttncattttnacctaagaggctcaaagc

SEQ ID NO: 1185 - DNA, 336 bp, Mus musculus
  misc_feature (1)...(336): n = A,T,C or G
gactgagaccagaatcgcacttattcggtcttgtaattcatcctgaaactgtggaaaactccatcaaaggtcacaccccaccaatgatttgattgatctttgaagtaagtacactgtagctgtcttcagatgcaccagaagagggcatcagattccattatgagtggttgtgagccaccatgtggatgctgggatttgaactcaggaccttcggaagaacatnantgctcttacccactgagccatctcacctgccttggttgggtttttttaatgtagaaaatcccntgcttgagagctgcaaaatacactcagattcagactgaaaaaaaaaaa

SEQ ID NO: 1186 - DNA, 344 bp, Mus musculus
actgagactgaacactgaaacttctagagaaagcacagaggatacccttcaagataccggggaatagagaaccttttaaatggaggaccaaccgcacaggaactagccccaagcatcagcacatggtctacaggaaagtcaagtttctgctcagcaaaggaaacggtcagcagagcacaggcggcccacggcccgggacatcatctgtaccagctacacctcagacaaagggctgagttggcatccagaatttaccaagaactgcagaaattaaatatcaaggaaataaaattgccaatcaataaaaaggcaagtgaattgaataaacaacttaaaaaaaacca

SEQ ID NO: 1187 - DNA, 300 bp, Mus musculus
  misc_feature (1)...(300): n = A,T,C or G
taagggactgagctacaggtgcaaganctgggccttctatcctngangatcagnananggantcggagtctcaagaatgantttgcatactcctacatagtgcataagatttggttagncccatacattctgtncccagggccagtttacagtttggnttggtttgctgngaagncaaggggctcctaccggattcagggactcangtctcnatttccangagactaggcagcagggtccactatgccttgantcctatactgggggattgaaccccagagccttggggcacaaaaagca

SEQ ID NO: 1188 - DNA, 223 bp, Mus musculus
  misc_feature (1)...(223): n = A,T,C or G
agaactgttgccatcctcacgcagccctcctccactacaccaacatcatcttctagctccttncgaggngttagnagtttcaaagagcangcctttccacagggaggcntgcttcnacttaggttcttacagcccagcccatggtggattaganatcctnttaagcgttngacttntaaaangacctggttctttttcagngattcngagttttaccatataa

SEQ ID NO: 1189 - DNA, 227 bp, Mus musculus
  misc_feature (1)...(227): n = A,T,C or G
aagcagtcccagcttcagagacttccgcnttnttggnganggnatcatcatgggacgactgccatggacngcaatacatagagaggagcantccagtgagcaatactcctccatcggcctcagttcctgcctccagatttctgccttgagttcctaccctgacttccntggatgatgaactacaagttgtaagataaaatacaccctttctttcccaaaaaaaaaaa

SEQ ID NO: 1190 - DNA, 255 bp, Mus musculus
  misc_feature (1)...(255): n = A,T,C or G
aacagagtcgtccatagancantatcatccaaacttaatgagcgataatncaccaagnagggcnnctcacccgaagagttgcctagagtncangtctgtcatctatggggancgtgctgcagtccatcctgcccatcatcagaanccatgnccacactaggcattgactatgcagagccaagctgtgcggatgccgnaanacagntcnacatcctggnntgactccccgnggaggggccatgcctcctgagttgg

SEQ ID NO: 1191 - DNA, 176 bp, Mus musculus
actgaggccgagagcggtcagatcccttggactggagtataggcccctgcgatccacttgatgcagttgctgggaattgaacctgcgtgctttggaagaacagccagtgcttgagcaactgccgagccttcgacgggccccttctcaatgaagtgcctttagatttaaatataaaa

SEQ ID NO: 1192 - DNA, 144 bp, Mus musculus
  misc_feature (1)...(144): n = A,T,C or G
gactgagctgaagatgaccttggccttctgatcgcttcctccagacagcagggatcacaggngtgccttacctgtgaccctcagctccgcttatgtcgtgctaaggatgaagccaagggctctgcagatgctaggccagtactc

SEQ ID NO: 1193 - DNA, 538 bp, Mus musculus
  misc_feature (1)...(538): n = A,T,C or G
gactgaggtcttgttatggaatggtgacagcccccccctggcctctgcacagggatactgtgatgatggactcagagaaacccgtcgtagaagacacggagcctgtggatcatgctgacagttggagcaggtcagcctcaaccccatgctggaaccaacggncaatggccactgttcttcttccaaagnactgnggnggcttgcctgcggagtctccagacaccnccatggacccncacnggaccnnccacgggatcttntganctctggggagnggaacacnnngtntgctncaatccnnncnngcgagggacctgagactgcattaactanggaagcanataacctggcctgatcaggggcacaagtncctttccggtccaccccagcactngggtgccttccagcagagtctttggacacccacaaggacccacacagaattccccacaggatcttaanaccactggtgagtggaacacagcgactgctccaatccaatcatgctggacctgagatttnattaactagggaagca

SEQ ID NO: 1194 - DNA, 288 bp, Mus musculus
aactgaggttggaggttagcacggagtgtttctcaatcattttccaccttacattttaagacatggtgtgtcactgaacctggaactcaccaactctgctagactgggtaggtagccagcaatccctagggacctcctagctctcagcttgtccaggatttcgattacatgcatgtatcaccatgcccaggtttgttatttcgctttgtttcttgatgaggtctcactctgcagccctggatgccctagtactcaataaatagaccaggcctctgtcaaaaaaaaaaa

SEQ ID NO: 1195 - DNA, 349 bp, Mus musculus
  misc_feature (1)...(349): n = A,T,C or G
gactgaggcctgaatgccaggcctggncaggaatcctgctcctgggcacctgcctgctgtactgcgcccgagtcaccatgcccgtctgtactgttnccatgagccaggactttggctggaacaagaaggaggctggtatcgtgctcagcagcttcttctggggctactgcctgactcaggtggtgggcggccaccttggggatcggtaaccaaccccctctccccactgctcaggcctgagggggatcattaccatcacctgacacagtgtggtcagtcccgcccttgcacacaggagaggaggggtggatagagggaggagnaataccnanagagcctttacctacag

SEQ ID NO: 1196 - DNA, 369 bp, Mus musculus
gactgaggcctgagaaacagaggctctgcaaggctcagtgactttcccaagaacacagatggctggcacaggactcaggtcccctgagtggggacactataggacaccagcatttatacgggttccctttccaccagtaccttggttcctggcgtccctggctcaccctgtgtgggaaagaaggcggcagtgaagaaaagacaaagcagaaccaagggccctctgctttccaggagggccacttcctctgcttaggggacaccccagggcagaggctctggagggtctcatcccctcccctccagaccagtggtttccaaccttcctaatgtcacgatcttttaatacagttctgcatgttggaccaac

SEQ ID NO: 1197 - DNA, 339 bp, Mus musculus
  misc_feature (1)...(339): n = A,T,C or G
gtggaggcagggaagggtctggagatgaggaagctagtcctctctgggtttctggccagtgaagagatctacattaaccagctggaagctctgttactggccaaggatntggannaanngaatcagccacttgtctgcctactccngggacccnccatgtcgacaggcgggagannanancancacacgggtgtgcgangggncnagnncctcttatcctctcatnctgccagcggaagactngtgntatctgggaagttgatacaggnncnacataccangggngcggccctnngctgccccagnactgnctctnggtaggngtgtatccggtcaatc

SEQ ID NO: 1198 - DNA, 305 bp, Mus musculus
  misc_feature (1)...(305): n = A,T,C or G
ctcgttcagcttctgaagaagtgtnggngtcagactcaggcagtcagtcggaaagtgagcagggcaancgagcccggaagtggacatggcancgagtncccaatanccagatcgggagttctttcttgagagccaatcaanagtctggagagtgaatncggcaaggttcnaaatncccgagccagtccttttccgggaaagccaaaanaaaggccctgccctnttaagaaagggagcggggttaggcttgattgtngaaaaaagatttgtgggganngaattattccttggatggtttaatgggg

SEQ ID NO: 1199 - DNA, 320 bp, Mus musculus
  misc_feature (1)...(320): n = A,T,C or G
aagtcagaacttgaggtttctcattgagcaacattatcagcttgagtgttttttaaactcatttgtcntggcctgactgttaaataggcccacaggggtccttgccttcccaananttaanaacttgtgcttgtgccatggnaaatggctnaggaacanaatgtctntcantgggaaaggaaaccttntggancctgantaccccaaangcannagggttggaagggttccttgggaaaaggggtgggacctnttggaccccgnaaaaatcgntttttgacccnacnctttgaaaaacccannaacaagcttgggggggc

SEQ ID NO: 1200 - DNA, 267 bp, Mus musculus
  misc_feature (1)...(267): n = A,T,C or G
gacgtctggggagctcctgcattaagtcagaaactgagggatgccattctagatgtctggttcagtgagacagagatttcactctggatcctggtgtgaccacgtaaaacaactagtgcatgtgggaatacatagcagggcatgttacattgctgtgcacaatgcactcaaaggcccctgatgctggccctgccacctattattttctccactgtgcaagatgcttgaagnggagattaaaggttttgctggcttccacaaaaatga

SEQ ID NO: 1201 - DNA, 262 bp, Mus musculus
  misc_feature (1)...(262): n = A,T,C or G
cccctgggaagatgctgattatcttgtttacaacagncaccgatngatttggctttttacatgnggaggancttccataccataatgcagctgcggaccgncanaagcnactgggaaatcgaaaggacttccaagtggcctgaaaangctnaananatgnnagagatacttagaacaccnanaagtttcatcgactgaatttacaaagganttccactccagctccgaggtgaagtctgggcntcttcttcttgagatccct

SEQ ID NO: 1202 - DNA, 281 bp, Mus musculus
  misc_feature (1)...(281): n = A,T,C or G
gacgtctggggagctcctgcattaagtcagactgaggtnctaggacagaagataaaatattgactgggtttatctatacaaaactccacttatggnctggagagatgnctcaatgggtaagagcaccaactgctctaccgaaggtcctgagttcaaattccagcaaccacatggnggcatacaaccatctgtaacgagatctgacgccctcttctggtgtgtctgaagtcaactacagtgtacttatgtataataataaataaatctttttaaaaaacttg

SEQ ID NO: 1203 - DNA, 506 bp, Mus musculus
  misc_feature (1)...(506): n = A,T,C or G
gacgtctggggagctcctgcattaagtcagactgaggccacgtctctcaggagtgaaacagttcctgtgaaacaaacaagaggtggactcaagtgtgagaacatgttcttaggttccacatatcatatcgctctctggaatcaggacagaaaaaagtcatgacatcttgagttccttaaatatagcnggaagatgacagaatcaaggatatcatttgaggatgtggctgtagacttctcctgggaccagtggcagctgcttagccctactcaaaagagtttatacagagatgtgatgttggagaactgcagcagccttgtcttcttgggtaatcaaaccaccaaacctgatgtaactttcaagctagatcagcaagagtcacggataatggatgaagaatgcctaagtcaaaactttttagagatctggctagacagttattctgaactatggcttcaagatgaacangacangcctanaaggatggagagaggcatggagataat

SEQ ID NO: 1204 - DNA, 229 bp, Mus musculus
  misc_feature (1)...(229): n = A,T,C or G
gtgaaaagaagagcttcctccttaacgtcatcagacattntanccttgacccagcatnttnactccagccctggctgacctgactaggccgncttngaacttagaacacttctgcctcctgagngctgggattaaaggcgtagcngccaccacgcccggctctagaagccaggattcttaatgtangaaccatctctctagccccnanataaatattttaaaaatattt

SEQ ID NO: 1205 - DNA, 204 bp, Mus musculus
  misc_feature (1)...(204): n = A,T,C or G
tctaccctgtgtaagtcantgaccctggctgagctttgtggacggagcaccgtgacaccggggcagatcctagagacagctaatggacttccanntagacctaangaagccancaanggncaaacgctatangganttnatcntgtctggnaacgggatngtgntacttcaatnancctggcntnnnggaaaccggacttaaga

SEQ ID NO: 1206 - DNA, 243 bp, Mus musculus
  misc_feature (1)...(243): n = A,T,C or G
agtacagagcgggaacgcgacctcctggaaaagaagttggccaaagcacagtgtgagcagtcacacctcatgagagagcatgaagacgtccaggagctgcacgacactccgctatgaggagcgcatcacagaactccacagtatcatttgcagaactcaacangangatagaccggctgcaaggtaccaccatcagggaggaagatgagtactcaaaacttcggtcagagctcagccagagtc

SEQ ID NO: 1207 - DNA, 426 bp, Mus musculus
  misc_feature (1)...(426): n = A,T,C or G
ttcttgggagcacagngaccttcttctagnnaagcgtncacatcattgtcaaagtcatcctgcaaaataaagtgttcagaccctacacccctccatgcttttgcaccaaggacaagtttnacatgtatgagggaacacacagaggagcccctcaatggggactgagcatgccctgatggcatttgatcatctgaaaaacaaacaggttgaaangacaagtgaaatcaacatgcctactccaggagcacacccagccaaagaggcttttcagcagcatctgctgacttgggttggaaagagacaaggctcaatgttagccaaactttctactgaggatctttcccttctccattaatatttaacctcacacagggtttttgnttttgatttccctgcttttaaaaataaagccacttccaaacctca

SEQ ID NO: 1208 - DNA, 215 bp, Mus musculus
gactgagaggaagaggaagaggaagagagaaatcagaggcaaaatatttccctatgataaattaattacacccggtcctgagttcaaatctcagcaaccacatggtggctcacaaccatccataacgagatctgatgtcctcttttggagtgtctgaagacagctacatgtacttacatataatgaataaataaatattttttaaaaagaaaaaa

SEQ ID NO: 1209 - DNA, 138 bp, Mus musculus
  misc_feature (1)...(138): n = A,T,C or G
gaaattcggcagcgctagagaaaaatgtcataatantaaatacactggagagtcanaaatctnaangacagactacgnncnatgcancatancgacatactaanctggtgcttaaagtanaatcgggggccaaataat

SEQ ID NO: 1210 - DNA, 136 bp, Mus musculus
  misc_feature (1)...(136): n = A,T,C or G
actgagaatacaattgtggagactggacatgctgcacatgacattcatggaaccctgctaacanccctgancattatataaancaggtntggggccatctgttttgcggcatnatggctgccctccagcctgggct

SEQ ID NO: 1211 - DNA, 304 bp, Mus musculus
  misc_feature (1)...(304): n = A,T,C or G
ggatgcagccatttccccaaaccactgcatggggtgtggagcacattcaanctggttcctttctctggggctcgnagccagangagactgctctcacangcttggtctcaggcggacagaaangacctccncctacttncantncctnnntccgggaatctttcactcaggacatanacaatncaagaaagtcttgannactctngacagatgtctggnnctgaccagnnggnnaaacngggaataancatgcttgcctacttagctacctatgccattttgagaggaaagagggacactctgg

SEQ ID NO: 1212 - DNA, 123 bp, Mus musculus
  misc_feature (1)...(123): n = A,T,C or G
aagaaccctaaaagaatngagtgcttctcctggaaaaccactgnacagtgtctattaaccttnaaggacgcggnttttnggacttctcattaggaggaatgggacntgtctcaattttgctca

SEQ ID NO: 1213 - DNA, 221 bp, Mus musculus
catggtctctgtcgactctcgattttgatgaagtcactgtgaatgctgcccaccattggagatgactttcaggggaagaggcacggggttgaaacaatgctgactgtcctggaattcactatgcagaccaggctggccttgaactcagagatctatcggcatgcaccaccaaacccagggtaaaaagagtcagcctaggagctccagaaacaactcaacag

SEQ ID NO: 1214 - DNA, 832 bp, Mus musculus
  misc_feature (1)...(832): n = A,T,C or G
gacgtctggggagctcctgcattaagtcagactgaggacaaaatgcttttcacgtagcaagcaggtgaactcagccagnancagnactctaacaggncngagccaccacgcncggnnttggancttgaanagtatggacttgaagtagcctcaattgccaaacccagagggactgagganggtntctaananctacacanaggaggatgccctgnatnttatgcctctgacctnaagtgctgaggttgnctccatgcagcggagtactgcagctcaagaactactgggagntaacacccaagctaancttcgtgaggnttttctgtgtgtgtggccgcctganaacacagccgacctgcgtggtgaccttgacctgaccagagctctgtctcagatggcttccatagtcatgggcagncagagaagaggaaacaggcccagagagcgcacacctcgctaaggngtccagggattagatgtgcacactcctgctggcctacatatcctgtgtggncctgaagctctcatcccacccacagaagtgaagatgggcccagaggcgggaggtgacccttnttgttcagctttcaaacaggggcatgcgcatgagcagtgttggccagtggcacttacagagccacttggctgaatctcctnacccatcacgacatgttttgagcgctntccagcanacaaggnttccaaagngntgtgtnaaccggncgtggnggcgcacgcctttaatcccagtacttgggaagcanaggcaggcggatttttgannttcnaggccagcctggtctacaanngagctncaggacagccaggctac

SEQ ID NO: 1215 - DNA, 327 bp, Mus musculus
ggcttgcccaatgtatcattgatttgatagcagcgtattcttcagccacgacaccagcactctgatgagagaacactgtgagaccctggcccaaagcgcgctatccctggcgctctggtttctctgcaccatcctgctccttctgccacgccactgcgcttcgttgcagggcacgcggactttcttcgaccttaattcaaaaaatggagagccaggccttcttcgcccgtgttcaccatctcccacctccagacacgtacagcttgcctgccctgctgttttcttcgcggcatttaataaagttgccctcaaacttaaaaaaaaaaa

SEQ ID NO: 1216 - DNA, 185 bp, Mus musculus
gtctcagaagtcagaagaggtcagtcagctcccctggtggagctggagctacaagcaactgtgaaaactactctgcatattactcttcaaaagcagtaacaagtgatcttccacccctctgcctctcctctgcaagaacagcaagtgctcttaacctgttaatcatggagcattttcactagcat

SEQ ID NO: 1217 - DNA, 458 bp, Mus musculus
  misc_feature (1)...(458): n = A,T,C or G
cgtctggggagctcctgcattaagtcagactgagntctnccccancaccatattanaganncgacnccgagcanagntattatgctncnttgngtgntgaccgtgatcaagaaaganaatggagatgcaacgattttactgacangtgggaaggatcaaaccaacttcntntataggnggacttacttattagnataggtgaactnataaacagacacaagctgggatggctaggctgnctccatgacaggcttnaaattggcngttcaggagacaaggcctaaatcctctgtttccaaagaacttggntacnccccaggcaagtccnggcctcatgangctgccttgccacctggcctgaggncnnggacaacgagtccngcagcagnnttttanaccnttnctcagccacaaagcnttccanacncncgcccgggcaacagtcttctatgctttcc

SEQ ID NO: 1218 - DNA, 254 bp, Mus musculus
  misc_feature (1)...(254): n = A,T,C or G
gagggcctgaaatgaaaagccagcctccttccaacagtcacagccaggcctgttacctagaggccagaaatgctttcttgccaaatggtcaggaaccaggaggcagatggaactggcttgccctttgtcactctgactacaagggtggaagaaatgcctactatgaattcttaaaacatgngagttatcctcttgtacagaagncagacctaagttgaaattaaattggnccttatattattaacaaaaaaaaa

SEQ ID NO: 1219 - DNA, 150 bp, Mus musculus
  misc_feature (1)...(150): n = A,T,C or G
ccagctcctccaccatacagcccaagtccagcngggccnncaagatcaaagatgtgtgccagaatgcccagagcngnccagtttcngagacttatncattttggagatggnngtcatcatgggacgnactgcnaggacagcagccataga

SEQ ID NO: 1220 - DNA, 402 bp, Mus musculus
gagagccaacacaaaaagtgggaaaagcctcaaggagaaaggaaccatgaggcctggctgctgaccactcaggactgaagagcggtaagctgagagagagtcgatgacagcgttcaccagagcatcccgggcatcactcaggctggcagtcaccgacctgtcaacagctagtgaggagctcactatttaccgctggctgccctggcactcgcagtggagatgaggtcggccttaggctgtgctgagtcgcctgtctccttcccgcacgggattgcaagcatgtgctaccatatttgctttacttcatgttcttcaaacagcccaagctcaggctttttcacgtcagctttccctcgctgaatagccttgacccaatacatcactgactgttaaaaaaaaaaa

SEQ ID NO: 1221 - DNA, 282 bp, Mus musculus
  misc_feature (1)...(282): n = A,T,C or G
gggcacccgctacctcatntcatactnctnacgtatctgccgggcccagcagnatcaaagttgngtgccngatgcccagaggtanncagcccagtttcagagacttcagcattttggagatggcatcatcatgggacgactgccaaggacagcagccatagagaggagcantccagtgagcaatactcctccatggcctcagttcctgcctccagatttctgccttgagttcctaccctgacttccctggatgatgaactacaagttgtaagataaaaatct

SEQ ID NO: 1222 - DNA, 254 bp, Mus musculus
  misc_feature (1)...(254): n = A,T,C or G
ccattgtcatcatctttntgagagcgagtgagagagaggaggtctctctatttagcactggctgtcctggaactctctatgcagacctgcagatcagactggccttgagctcacagagattcaggnggcctctgcctcctgagttgctgggatcaaagtgttcacctagacaccagctnnctncaccatactgcccaagcncagccgggcccaacaagatcaaagcttgtgngccagatgcccacaggtaagtc

SEQ ID NO: 1223 - DNA, 491 bp, Mus musculus
tctggggagctcctgcattaagtcagactgaggtgaaagaatgtcttgctacacatgaaagactgttgtcctggagcagacacagatgaaaggaaggatgtgtggatatagcaaacacgtgaaaggactcttaatgaaggagtataaatatgaccccacagataatgggagacaagcactgagccttcgtttggtttgttctgcctcctcgctatttttccactaatgactcacatgaatcagttcaccttatacatagtatggttgagctcaacttgtgataacaccgccattgagagaagaaactcgcccaagaactgcttgtgaagttcctgcggcagattgccatttccacggcctcacacctcaggtcatttggcaagcctagtggtttcttcaggattgaattacagctgcctggtgtctgcgtgctgaaaggactggactgtagctgctggttttgtgcctgggtgtctgcctgccctaggact

SEQ ID NO: 1224 - DNA, 110 bp, Mus musculus
  misc_feature (1)...(110): n = A,T,C or G
taaagtactgagtgagatcaagaaaganattcggngatgtanagattttactgaaaagtgggaaggataacccctaaancaantattagaagacttacaaattaaaaaag

SEQ ID NO: 1225 - DNA, 334 bp, Mus musculus
  misc_feature (1)...(334): n = A,T,C or G
gacgtctggggagctcctgcattaagtcagcaactgagncatcattcatcatcgtcgtcgtcatcgtcgtcattgncatcatctttttgagagcgagtgagagagaggaggtctctctatttagcactggctgtcctggaactctctatgcagacctgcagatcagactggccttgagctcacagagattcggcggcctctgcctcctgagtgctggnatcaaagtgttgcacctggacaccagctncntccaccatacttgcccangtccagccggccccancangatcaaagttgtgtnccagangcccagaggnaagcagccccagtttta

SEQ ID NO: 1226 - DNA, 105 bp, Mus musculus
  misc_feature (1)...(105): n = A,T,C or G
gagagacttttcctcccccccttgatntcnctgcctgtgaangccnggggcnagcgtcatctaanacgcctcctgcagagaangccagagaagagctataggggc

SEQ ID NO: 1227 - DNA, 309 bp, Mus musculus
  misc_feature (1)...(309): n = A,T,C or G
tctggggagctcctgcattaagtcagactgaggattcttnttcgcaaaacannagggccancagaacagaacaaaatgtttcagacggntccccgaacgctggnactgtggagcagacgcccangaagcccggccttcgacgcnngacgtaancanctccgnattaanaatattngccttgnntattagatacatnactggtttatgaagcaaggatgatatacatgaaaaaatttaantgtgtagnngttnactncatanaanggacnttttggattcggnctgagaangcataaacattatcactaa

SEQ ID NO: 1228 - DNA, 573 bp, Mus musculus
  misc_feature (1)...(573): n = A,T,C or G
tctggggagctcctgcattaagtcagactgagctccagtgtgctgctctgctcggnacaacttaacgattttggcgttctgtggtttcttcgttctctatgccttacgggtgaacctgagtgttgcgttagtggacatggtagattcaaatacaactctgactgataatagaaccgtctaaggagtgtgcggaacattctgcccccataaaagttcaccacaatcacacaggtaaaaagtacaagtgggatgcagaaactcaagggtggattctcggctcttttttttacggctacatcgtcacccagattcccggtgggtacattgccagcagggtcggagggaagctgctgctgggcctgggcatcttaggcacctccgtcttcaccctgttcacaccgctggccgcagacttaggcgtggtgactctcgttgtgcttagagcgctgganggactgggagagggtgttacnttaccagctatgcacnccatgtggtcttcntggnctccccctctggaaagaagcaagcttnttaccatttcctatgcggaancacagcttgggacagtga

SEQ ID NO: 1229 - DNA, 374 bp, Mus musculus
  misc_feature (1)...(374): n = A,T,C or G
ttgacctctaggaagtcancccgacccaccaaactanactcaaatggccagtccccgttccatctggcagcctccaaaggcctgacagagtgtntgacaatactgcttgcaaatggggctgatatcaacagcaagaacgaggacggaagcactgcccttcatttggccaccatctcctgtcagccacagtgngtgaaggtcttgcttcagcacggtgctaatgaagatgctgtggatgcagaaaatcgnagnccattacactgggcagnctcctctggctgcgcctcaagtgtccttctgctgtgtgaccacgaagccttcctggacgtgctggataatgatggacgcacacccctgatgattgcatcgctggg

SEQ ID NO: 1230 - DNA, 203 bp, Mus musculus
  misc_feature (1)...(203): n = A,T,C or G
atccgggaatctgacaacctactgggtgaaagcaattnangtcctgcgcattcatcttcttgaactgtagaaggttaatgagctntgtaaagatttntgnagccggnacattgcttgtctgaagacaaaaaatgaacagngagaccttgttnagnggggagccctggaanttcccttctccntttgtgccattcccaagcccc

SEQ ID NO: 1231 - DNA, 199 bp, Mus musculus
  misc_feature (1)...(199): n = A,T,C or G
ctgagatgctgaggantncngcctccatatggaaatcatacttgtatcagctgcagnaagaggcacctggtnccaagaggatcatttgtccccgngaggcccnactnaactctctncagngcactttgcntgncncgatgatttggcagctcntggggctanttnctnganggacttcagctttcctggggggaaattt

SEQ ID NO: 1232 - DNA, 350 bp, Mus musculus
  misc_feature (1)...(350): n = A,T,C or G
cagccctgcctaccagcagacagctgacggtcttaacaggcacatgaccnagangcgcgctctnctactcttggcattgcccggacacccatgaagatnagnggtccagaccctnagttgctnattggtgaaaagagctgacngnagtatttggagacnnaanccntnngaatcaatttcttccccaaagcttggntcttgccccggaaangggggtttatttttatgaccttggacctgnttttnanantcctcagttattccccctganggacccanttcccccccttggangcnaggcttgnactcggatccccaaaaaagggtgtttanccaagggaggaaagcca

SEQ ID NO: 1233 - DNA, 111 bp, Mus musculus
  misc_feature (1)...(111): n = A,T,C or G
actgaacctgccgcctntggctggaaaacaaggtgccaccagcgctggcctcactccatccgaacaggaanggccgaggtgggnggttctngtatgaaacgcatcattctg

SEQ ID NO: 1234 - DNA, 124 bp, Mus musculus
  misc_feature (1)...(124): n = A,T,C or G
cttttgggctgaggtgacagcctggccaggaggccatanntacttcttgtggaactctcaaaggnctggacagggaggcctggggccagncacaggccctcctatanatgcggcccataacaga

SEQ ID NO: 1235 - DNA, 128 bp, Mus musculus
  misc_feature (1)...(128): n = A,T,C or G
tatggggaccttaccagggactgcagtagctggggggaccattntaacccttgatggannatctcatgngggtcctcaagacactggagcaggtaccgnngagatctgcgcactgtccgggctgaacc

SEQ ID NO: 1236 - DNA, 175 bp, Mus musculus
  misc_feature (1)...(175): n = A,T,C or G
aaaactgactttctgaancaacacttgctttgaagatgtttaacaaatcatttggaaccccctttgggggtagtacagggggctgnngagatggctcantgngtaagancacccgactgntcttccgaaggtnanggagttcaaattcccancaaccacatggtgggctcacaaa

SEQ ID NO: 1237 - DNA, 120 bp, Mus musculus
  misc_feature (1)...(120): n = A,T,C or G
tcaaataccatcaaccnttctctggcannanacccatccggagcgatntctgatgccttcntcnggagtgactgaagacngctacagcgtncttacatnaaataaataacatctctataa

SEQ ID NO: 1238 - DNA, 155 bp, Mus musculus
  misc_feature (1)...(155): n = A,T,C or G
ccaccacggacggcccgggtaggagagatgggtcccaagccgtcggaccccttcctgtcctctccaaatgcttagccttgaggcaggggtaccaggttgcgggggcccccgaacctgtttcactttggcccacatgnggggataaaggcttcatc

SEQ ID NO: 1239 - DNA, 236 bp, Mus musculus
  misc_feature (1)...(236): n = A,T,C or G
actgagacatccctgtcctcccgagtcttcagctcttgtcgtgccttagcatgtgtgtctgtctcagctgacatcactctgccaatcaacctgagtccacggaaacagcangaaactgtaacacaccaccagaaggtttttggtagtgtttctctctatggagtcctgacaaatgcagctcanctacgcnatgtaaggtggaccaatacattcatgctgtttgcaaagaaaaaaaa

SEQ ID NO: 1240 - DNA, 299 bp, Mus musculus
  misc_feature (1)...(299): n = A,T,C or G
ttgcctcagtatgtgtgtntgtctcggctgacatnactccgtcnatnatnccaagtncacagangcancangaanctgnanngcaccacacagaagtcttttggccagtttntctctatcaagtcctgacaaatgcnactcaactatgcaatggaaggtggaccaatttgtatgctgttagcaaagaatccttcatcacatgttatttnatagngcttgctttagcagaacaccaacaagngngngtgcgaggagatngncattatccccagcaagaagcttgggaacaagatagccgg

SEQ ID NO: 1241 - DNA, 129 bp, Mus musculus
  misc_feature (1)...(129): n = A,T,C or G
ccctgtcacatcatcccatggaacactttcctctgnaagaggaggataatattgatgtgtntanaanacaaggtgnnggntacgaaacacttanttaccnntctcccgggccttaacttcttggccccc

SEQ ID NO: 1242 - DNA, 218 bp, Mus musculus
  misc_feature (1)...(218): n = A,T,C or G
gggcccagagactgaacttncttgccntgtagcaagggctgaggtatntctggccctgctactatgcctnatcctnctgcccaccatgttcnnctcctttgganccgtctgctgcagcctnaacaagatagacttcatcttcagnttcctcancattgttatcggagctggangaggaactacagnangcctaccanggagcagaggctaaactactt

SEQ ID NO: 1243 - DNA, 175 bp, Mus musculus
  misc_feature (1)...(175): n = A,T,C or G
aaagctcaataactggnatgtatcancgagcatnacatgaaccnactcatcatgaactacctatnanacagaggnctttaagganccagcngagacctnttggatggagnntgggatntgaaccangtgaggncctagaaccncttgangagcgaataatgattccgtagatgat

SEQ ID NO: 1244 - DNA, 414 bp, Mus musculus
  misc_feature (1)...(414): n = A,T,C or G
gactgagcttgtgcttccgctaaacttggcnttcgatacctacctaacatgatgggcatatgatggccgccatttggaactgagaactcctctacccatgcctcgttgttccccgaatgacaactctgagacttccttatgagtaaatgcctaggctcattccccgatcancttgtgacacatataacctgtttgttcatgtctgccacatggtnggttacctctcctcagtttcatttgtncgtctcctccgagtctgggatgaaatctcccgctcttgactttttcccagaattcctttttctctctgcccagtgttccaccttctaatcctgcctcagctcattggccattggatttttattaacaagagatgctttcacacagtacatgctgtgaagaatcccagaactg

SEQ ID NO: 1245 - DNA, 124 bp, Mus musculus
  misc_feature (1)...(124): n = A,T,C or G
taagtccaagctgaattggncaatncttttgctttttaccctgnaagaaanactcataagccacctctgtatatttacccccantcttnacaagaaaaactgtaancctccgcgagccacatac

SEQ ID NO: 1246 - DNA, 215 bp, Mus musculus
aaaccccacccggcaggcaaagtggctcagcagggagaggccgtgtctgctgctaatcctgagacccgcatctgctctctggaatccaccagatagaggagaacggagtcacacacggatctccacatacactcctggtggcatagtatgcacatggtaacacacacacacacacacacacacacacacacacacacacacacacacactgtgag

SEQ ID NO: 1247 - DNA, 216 bp, Mus musculus
  misc_feature (1)...(216): n = A,T,C or G
tacccacccttttgagcaagntcagcctggttaagtncaagctgaattggncatcgctgncccatttaaatggcgcgccctcgcaggaaattcgggatcccggcggcgccattttaaatggccgcttttgggccaaatttctttttgnttttttaccctggnaaggaaaatacctcataaaaaccacctntggttatnttacccccaaatctttca

SEQ ID NO: 1248 - DNA, 423 bp, Mus musculus
ttgtccggctgagccagtaagttaactcagtgagtaacggcacctgccatggagtctggtgacttgcgttcggtgccaggacccacatggtggacagagagaaccaaacagtgtacactgctggctgggaactcagcatcatcagcatctgcatctcaaatgctggattacagacacacagcatcacgcctggtgtgagccgagccttgatggaaaccttgcaactagccattaaagaagaaggggagaggggctggagagatggctcagcgggtaagaacactgactgctcttccaagagtcctgagttcaattcccagcaaccacatagtggctcacaaccatctgtaatgggatctcatgccctcttctggtgtgtctaaagacagctacagtgtactcatatacataaaataaagaaaa

SEQ ID NO: 1249 - DNA, 237 bp, Mus musculus
tgttttgcctgtgtgtatatatgtacacgtatgtacaccatgtcatgagcctccatggtcgtgagaggactttggatcccttggaactggcgttacattggtcgtgagcctccatgttggcgctgagaagcaaacctgggttctctggaagcgcagcaagtgctcttaaccatcgagccatccctccatctcaagccacccatgtatataaaatgaaaatacataaaccaaaaaaaa

SEQ ID NO: 1250 - DNA, 237 bp, Mus musculus
  misc_feature (1)...(237): n = A,T,C or G
tgttttgcctgtgtgtatatatgtacacgtatgtacaccatgtcatgagcctccatggtcgtgagaggactttggatcccttggaactggcgttacattggtcgtgagcctccatgttggcgctgagaagcaaacctgggttctctggaagcgcagcaagtgctcttaaccatcgagccatctntccatctcaaaccacccatgtatataaaatgaaaatacataaaccaaaaaaaa

SEQ ID NO: 1251 - DNA, 187 bp, Mus musculus
  misc_feature (1)...(187): n = A,T,C or G
ataacagacctgcttggcttntaaggcccntcactaccccggngactcaatagtagttcccctgtgccaccactctgggccttttaatgccaagaaagaattcagccgcagaagaccttggagaaggcagacttccnttccccacatgggttgattccgnngaaaccttggtccccccccaaactta

SEQ ID NO: 1252 - DNA, 260 bp, Mus musculus
tgttttgcctgtgtgtatatatgtacacagtatgtacaccatgtcatgagcctccatggtcgtgagaggactttggatcccttggaactggcgttacattggtcgtgagcctccatgttggcgctgagaagcaaacctgggttctctggaagcgcagcaagtgctcttaaccatcgagccatctctccatctcaaaccacccatgtatataaaatgaaaatacataaaccatttgtttgtttgtttctgaaaaaaaaaaa

SEQ ID NO: 1253 - DNA, 260 bp, Mus musculus
tgttttgcctgtgtgtatatatagtacacgtatgtacaccatgtcatgagcctccatggtcgtgagaggactttggatcccttggaactggcgttacattggtcgtgagcctccatgttggcgctgagaagcaaacctgggttctctggaagcgcagcaagtgctcttaaccatcgagccatctctccatctcaaaccacccatgtatataaaatgaaaatacataaaccatttgtttgtttgtttctgaaaaaaaaaaa

SEQ ID NO: 1254 - DNA, 238 bp, Mus musculus
tgttttgcctgtgtgtatatatgtacacagtatgtacaccatgtcatgagcctccatggtcgtgagaggactttggatcccttggaactggcgttacattggtcgtgagcctccatgttggcgctgagaagcaaacctgggttctctggaagcgcagcaagtgctcttaaccatcgagccatctctccatctcaaaccacccatgtatataaaatgaaaatacataaaccaaaaaaaa

SEQ ID NO: 1255 - DNA, 240 bp, Mus musculus
  misc_feature (1)...(240): n = A,T,C or G
atcgctagctaatcctgagacccagtatttgntctctgnaatccaccatatagaggagatctggagtcacacacggatatncacatacactcctgntggnatagtatgcacatggnaacacacacacacacacacacacacacacacacacacacacacncnntgngaattnaaanacannggntgangcatccatnatgatgggcanacgganggagacaggaagctaagccagctgag

SEQ ID NO: 1256 - DNA, 430 bp, Mus musculus
gcagtgaacaagacgtgtggtctgaagatacacaacaccgagacaggactgtgtggtgctcacatgccacgagctgagttcaaacagcatccaagccctaaagaccagagccatggaccaatatggtggatggcatgtgtgcgcttgttccagaagtgctactcatcatggaggcaaatcctgtgaggacgtggaagacttcacctggtttctccgctttcctcccggtgacacgggggatacttcgggcagatactgaactgtctgctgccatttacagccacagttacatgggattgtttgttccttccctgggcttctacctcttccttgactggaacagaagctaggtgcttagataaacctggtcaaatattttaaatcaggattctctttttttctcagcctaagagcttaagtggctatttat

SEQ ID NO: 1257 - DNA, 215 bp, Mus musculus
  misc_feature (1)...(215): n = A,T,C or G
ctggacatagcacctncancggcctgccgnatgagaccattaangatctaangcgggcagcnngtaagcgntntgctgtnntgtcatgcaaactgccntgctctgcgggacctnaagacananncattcntgcgccaaggaatggggaccggatgctgctgacnttggncaacttggaaggtactgttcccggaagnncttaaccctggggcggg

SEQ ID NO: 1258 - DNA, 337 bp, Mus musculus
  misc_feature (1)...(337): n = A,T,C or G
gctgttcctgccccatgcctttnncacaggcgcgccggatccgaattcctngagggcgcaccatttanaagccctgtntnntntatncagnttggacttaaccaggntgaacngnctcagaaggtggggactactctnccttttgagcaagttcagcctggttaagtccaagctgaattggcctcgctggccatttaaatggcgcgccctcgaggaattcggatccggcgcgccatttaaatggccgctatggccaattcttttgctttttaccctggaagaaatactcataagccacctctgttatttacccccaatcttcacaagaaaaacggta

SEQ ID NO: 1259 - DNA, 180 bp, Mus musculus
gagcctcctcattgccagcagctgccgagtaccaggattctgcttcacctttcttgtcctcttctctctgatgtcttcccagccccagcatatgacacaagttttacagggacttgctgaatgactgagttgtaacctgtaaaatgaaataaattcttcccctcatgttaaaaaaaaaaa

SEQ ID NO: 1260 - DNA, 239 bp, Mus musculus
  misc_feature (1)...(239): n = A,T,C or G
gaggccaattcagcttgnacttatccaggctgaacttgctcanaaggnggaaactacccaccttttgagcaagttcagcctggttaagtccaagctgaattggcctcgctggccatttaaatggcgcgcctcgaggaaattcggatccngcgcgccatttaaatggnccgctntggccaaatcttttgggtttttaacctnggaaagaaanacntntnaanccccctctgtttatttta

SEQ ID NO: 1261 - DNA, 332 bp, Mus musculus
  misc_feature (1)...(332): n = A,T,C or G
gcggcgccatttaaatggccagcgaggccaattcacgcngggacttaancaggntgcnccnggctcanaangttggganactacccaccttttgagcaagttcaagcctggttaangtccaaagctggaatttgggctngnttggncaattttaaaangggcngcgcccttcggagggaantttcgggaatcccggnnggccatttttaaaaatngggcccgctantggggccaaaattccttttttngngtntttttaaacccctgggaaaggaaaaataaccttnattaaaagncnacccttnntggtttaattttaaaccccccaaatt

SEQ ID NO: 1262 - DNA, 253 bp, Mus musculus
  misc_feature (1)...(253): n = A,T,C or G
actacccaaccttttgagcaagttcaagcctngggttaaagtccaaagcttgaaatttgggcctccgctgggccattttaaaataggcgccgccctcggaggggaaatttcnggaatccnggcgcgccattttaaaaanggcccgngttattggcccaaaattcttttttgggtttttttancccttgggggaaagaaaaatancttcattaaaaccaccctcttgtttaatttttacccccccaattctttt

SEQ ID NO: 1263 - DNA, 129 bp, Mus musculus
  misc_feature (1)...(129): n = A,T,C or G
gggaatgaccacactgncacagtaagnaccggtgactgttcagcttataagccatntgtttanccttttgagcaagtcacagcctggttaagnccaagctgaattggcaantcttttcgcttttttacc

SEQ ID NO: 1264 - DNA, 288 bp, Mus musculus
  misc_feature (1)...(288): n = A,T,C or G
gacttaaccaggctagancttgctcaaaaggtggganactacccaccttttgagcaagttcaagccttggttaagtccaaagcttgaaattgggcctcgcttggccatttaaaatgggcngccgcccctcgnagggaaatttcgggatccccggcggccgccattttaaaaatgggcccgctattgggncaaatttctttttggctttttttaccctgggaaagaaaaanacctcntaaaaaaaccnccctcttggttnttttaancccccaaaatttttcacaaaag

SEQ ID NO: 1265 - DNA, 372 bp, Mus musculus
  misc_feature (1)...(372): n = A,T,C or G
aaccatttaaataggcgcgccgaatncganattcctnggagggcgctgccatttaaatgagccangncgaggccaattcagcnttgnnacnttatccaagggntggacaccngggcttcaanaaagagtngngngnnactaccccaacccttttggaagcaaaaggtttcaagcctngggtttaaagtcccaaagcctggaaatttgggccctcggcttgggccaatttttaaaaatngggccggcggcccctccggaaggggaaaattcgggggaatcccgggcngccgcccaatttttaaaaatagggcccgccttattgggcccaaaaatttcctttttttggcgtttttttttaaccccttggggaaa

SEQ ID NO: 1266 - DNA, 225 bp, Mus musculus
  misc_feature (1)...(225): n = A,T,C or G
agaagagactcctctctcctcccatttagagcttctcntgntttntnnncnggaaggntttnaaaaggagggggccttatgnnagcaaacctcacctttagttctttgctttttggccttttttcnaaagaaagggtcacctacccactacccactctatcaaagtcaggggacaatgganntttnnccggngnattaagggggncaaagggggcttcctatcct

SEQ ID NO: 1267 - DNA, 188 bp, Mus musculus
  misc_feature (1)...(188): n = A,T,C or G
catccatgccccgttgtgtggaatccactgaatacataccggaagtgtctgctttaccagatacactatngcccttttgagcaagttcagcctggttaagtncaanctnnatngnccaattcttttgctttttaccctggaaagaaatactcataaagccacctcctgntanttaacccccaatcttt

SEQ ID NO: 1268 - DNA, 104 bp, Mus musculus
  misc_feature (1)...(104): n = A,T,C or G
ttacctctttgagcatgttcagcctggttaaagnccaagctgaaattggncaattcttttgctttttaccctggaaagaaaatactcaataaagccaacctctt

SEQ ID NO: 1269 - DNA, 206 bp, Mus musculus
  misc_feature (1)...(206): n = A,T,C or G
tgagttgaagccgtactattttatancaangcatgggnttaacccttgntngatnnggnaggnnagaccatgnnnnccccttgttggagccaaggttccagcnctnggtttaaaagtccaagctggaaattgggccaattcttttggctttttaccctgggaaaggaaaatacttcataaaagcccaccttctggtttattttaac

SEQ ID NO: 1270 - DNA, 271 bp, Mus musculus
  misc_feature (1)...(271): n = A,T,C or G
ctacctgcttaatcagaacngacttntgggcccccttttttgtcaccaccctgtantaagagannngactcctttctncttnccatttancagannctctnatgcccntctacttcntnnaaaaagngttacaacnaacggnagcctttttttgagcaagttcaagcctggttaagtccaagctgaattggcctcgctggccttgaactcgggtgggccgctatggccaantcttttgctttttaccctggaangaaattctgcactaagg

SEQ ID NO: 1271 - DNA, 254 bp, Mus musculus
gacctcactatgtagccctggatggcctggaactcctgctctgcgtgcctctgcctcccgaggcggggatgcctgcccggtgtgggtcagcatgccaagcttgatcggtgctccttatgtacagagttggggatgaataccaggtcttgtgtgctctaggcttgcatctgtgcacacggaccctcctacatgcaaacccccacacgaacaggtacgtaccaccccctcactcacaaaagacaaaataaaaataa

SEQ ID NO: 1272 - DNA, 131 bp, Mus musculus
taagcaatggcatcaaccattcccctcctaccctgaatggtgccccatcgccaaccacattgccggccagcgaggccaattcagcttggacttaaccaggctgaacttgctcaaaaggtggggactaccca

SEQ ID NO: 1273 - DNA, 138 bp, Mus musculus
taagcaatggcatcaaccattcccctcctaccctgaatggtgccccatcgccaaccacattgccggccagcgaggccaattcagcttggacttaaccaggctgaacttgctcaaaaggtggggactacccaaatgccc

SEQ ID NO: 1274 - DNA, 136 bp, Mus musculus
taagcaatggcatcaaccattcccctcctaccctgaatggtgccccatcgccaaccacattgccggccagcgaggccaattcagcttggacttaaccaggctgaacttgctcaaaaggtggggactacccaaactt

SEQ ID NO: 1275 - DNA, 131 bp, Mus musculus; identical to SEQ ID NO: 1272

SEQ ID NO: 1276 - DNA, 140 bp, Mus musculus
taagcaatggcatcaaccattcccctcctaccctgaatggtgccccatcgccaaccacattgccggccagcgaggccaattcagcttggacttaaccaggctgaacttgctcaaaaggtggggactacccaagactaccc

SEQ ID NO: 1277 - DNA, 132 bp, Mus musculus
taagcaatggcatcaaccattcccctcctaccctgaatggtgccccatcgccaaccacattgccggccagcgaggccaattcagcttggacttaaccaggctgaacttgctcaaaaggtggggactacccac

SEQ ID NO: 1278 - DNA, 132 bp, Mus musculus
taagcaatggcatcaaccattcccctcctaccctgaatggtgccccatcgccaaccacattgccggccagcgaggccaattcagcttggacttaaccaggctgaacttgctcaaaaggtggggactacccaa

SEQ ID NO: 1279 - DNA, 142 bp, Mus musculus
taagcaatggcatcaaccattcccctcctaccctgaatggtgccccatcgccaaccacattgccggccagcgaggccaattcagcttggacttaaccaggctgaacttgctcaaaaggtggggactacccaaggactacccg

SEQ ID NO: 1280 - DNA, 132 bp, Mus musculus; identical to SEQ ID NO: 1278

SEQ ID NO: 1281 - DNA, 128 bp, Mus musculus
  misc_feature (1)...(128): n = A,T,C or G
cggccagagaggccaattntttttggacttaaccnggctgaacntgntcaaaagtangagactacccccactcatggcatcggaagatacagacacttggtgaaagtgcaggagcccaaaaaaaaaaa

SEQ ID NO: 1282 - DNA, 131 bp, Mus musculus; identical to SEQ ID NO: 1272

SEQ ID NO: 1283 - DNA, 131 bp, Mus musculus; identical to SEQ ID NO: 1272

SEQ ID NO: 1284 - DNA, 298 bp, Mus musculus
gccaccttcaggagctccaggacctgccggtaggcctcctgtcctgaggtcctccacacacagcttgggggcaaggagtggacgtcagtggtggaacacttatcggggaattccacctcagaagggatgaagacaaggcggctagcaagatggcacagtgggctacacaaacctgatggcccaagtttgatgctcagggccacataatggtgagggaaaggactcagagctgttttacgatttccacatgaaagccatgcatagcccttacagctccaaaccccgaaataaaaaaaga

SEQ ID NO: 1285 - DNA, 218 bp, Mus musculus
  misc_feature (1)...(218): n = A,T,C or G
taagcaatggcatcaaccattcccctcctaccctgaatggtgccccatcgccaaccacattgccggccagcgaggccaattcagcttggacttaaccaggctgaacttgctcaaaaggtggggactacccaaggcgggccnntntntgcaactctttacctntcctncctttctcccaaggaaggctgntaactgtgcctgctgcctggctttctgtt

SEQ ID NO: 1286 - DNA, 132 bp, Mus musculus
taagcaatggcatcaaccattcccctcctaccctgaatggtgccccatcgccaaccacattgccggccagcgaggccaattcagcttggacttaaccaggctgaacttgctcaaaaggtggggactacccat

SEQ ID NO: 1287 - DNA, 132 bp, Mus musculus; identical to SEQ ID NO: 1277

SEQ ID NO: 1288 - DNA, 134 bp, Mus musculus
taagcaatggcatcaaccattcccctcctaccctgaatggtgccccatcgccaaccacattgccggccagcgaggccaattcagcttggacttaaccaggctgaacttgctcaaaaggtggggactacccacta

SEQ ID NO: 1289 - DNA, 131 bp, Mus musculus; identical to SEQ ID NO: 1272

SEQ ID NO: 1290 - DNA, 125 bp, Mus musculus
taagcaatggcatcaaccattcccctcctaccctgaatggtgccccatcgccaaccacattgccggccagcgaggccaattcagcttggacttaaccaggctgaacttgctcaaaaggtggggac

SEQ ID NO: 1291 - DNA, 355 bp, Mus musculus
  misc_feature (1)...(355): n = A,T,C or G
taagcaatggcatcaaccattcccctcctaccctgaatggtgccccatcgccaaccacattgccggccagcgaggccaattcagcttggacttaaccaggctgaacttgctcaaaaggtggggacaacccaaangggnncggggnnnactnnctttggntttanncnnnngaagaaatactnatanggcacctntgntatttacccccaatcttnacangaaaaactgnnnnnccttttgagcaagttcagcctggttaagtccaagctgaattggcctcgctggccggcaatgtggttggcgatggggcaccattcanggtaggaggggaatggntgatgccattgcttactaa

SEQ ID NO: 1292 - DNA, 125 bp, Mus musculus; identical to SEQ ID NO: 1290

SEQ ID NO: 1293 - DNA, 132 bp, Mus musculus
taagcaatggcatcaaccattcccctcctaccctgaatggtgccccatcgccaaccacattgccggccagcgaggccaattcagcttggacttaaccaggctgaacttgctcaaaaggtggggacaacccaa

SEQ ID NO: 1294 - DNA, 134 bp, Mus musculus
taagcaatggcatcaaccattcccctcctaccctgaatggtgccccatcgccaaccacattgccggccagcgaggccaattcagcttggacttaaccaggctgaacttgctcaaaaggtggggactacccaact

SEQ ID NO: 1295 - DNA, 132 bp, Mus musculus
taagcaatggcatcaaccattcccctcctaccctgaatggtgccccatcgccaaccacattgccggccagcgaggccaattcagcttggacttaaccaggctgaacttgctcaaaaggtggggacaacccac

SEQ ID NO: 1296 - DNA, 125 bp, Mus musculus; identical to SEQ ID NO: 1290

SEQ ID NO: 1297 - DNA, 116 bp, Mus musculus
taagcaatggcatcaaccattcccctcctaccctgaatggtgccccatcgccaaccacattgccggccaattcagcttggacttaaccaggctgaacttgctcaaaaggtggggac

SEQ ID NO: 1298 - DNA, 138 bp, Mus musculus
taagcaatggcatcaaccattcccctcctaccctgaatggtgccccatcgccaaccacattgccggccagcgaggccaattcagcttggacttaaccaggctgaacttgctcaaaaggtggggacaacccactaccca

SEQ ID NO: 1299 - DNA, 306 bp, Mus musculus
gtgacttcaggtgggtgctggggttccctggacccagtggcctttcctgttcttggacactagagtaatccagcctcagagacgagtgagcaggccccagagttacatagcagacctaaatctgctgccttctcaccttcctaaacacggaatgccagaatcttaatacctttacccccaaaatggagacaaccttctgccagggaactgagaacaaggcatcaaagcaggggattcggaattaatgatgctcaattgtcctcgataagcgctggcatcaggactgattgttgagaagaaaaaaaa

SEQ ID NO: 1300 - DNA, 111 bp, Mus musculus
  misc_feature (1)...(111): n = A,T,C or G
ctaaggctgaaacctgcttnctcggggtggagcctcctgctaattcggnctntcacancccactgangnaacctgangagccaccacanctgcncctttctacttgggcca

SEQ ID NO: 1301 - DNA, 183 bp, Mus musculus
gtctcagaagtcagaagaggtcagtcagctcccctggtggagctggagctacaagcaactgtgaaaactactctgcatattactcttcaaaagcagtaacaagtgatcttccacccctctgcctctcctctgcaagaacagcaagtgctcttaacctgttaatcatggagcattttcactagc

SEQ ID NO: 1302 - DNA, 193 bp, Mus musculus
gtctcagaagtcagaagaggtcagtcagctcccctggtggagctggagctacaagcaactgtgaaaactactctgcatattactcttcaaaagcagtaacaagtgatcttccacccctctgcctctcctctgcaagaacagcaagtgctcttaacctgttaatcatggagcattttcactagcaaaaaaaaaa

SEQ ID NO: 1303 - DNA, 193 bp, Mus musculus; identical to SEQ ID NO: 1302

SEQ ID NO: 1304 - DNA, 193 bp, Mus musculus; identical to SEQ ID NO: 1302

SEQ ID NO: 1305 - DNA, 193 bp, Mus musculus; identical to SEQ ID NO: 1302

SEQ ID NO: 1306 - DNA, 277 bp, Mus musculus
atgaggaagctgagaagcaaaggtctgaatgctttgccccgtcgtcgtctcatagctaggacatagccaacgtgcagtaaccaggtctcagaagtcagaagaggtcagtcagctcccctggtggagctggagctacaagcaactgtgaaaactactctgcatattactcttcaaaagcagtaacaagtgatcttccacccctctgcctctcctctgcaagaacagcaagtgctcttaacctgttaatcatggagcattttcactagcaaaaaaaaaa

SEQ ID NO: 1307 - DNA, 196 bp, Mus musculus
gtctcagaagtcagaagaggtcagtcagctcccctggtggagctggagctacaagcaactgtgaaaactactctgcatattactcttcaaaagcagtaacaagtgatcttccacccctctgcctctcctctgcaagaacagcaagtgctcttaacctgttaatcatggagcattttcactagcattaaaaaaaaaa

SEQ ID NO: 1308 - DNA, 194 bp, Mus musculus
  misc_feature (1)...(194): n = A,T,C or G
gtctcagaagtcaagaagaggtcagtcagctcccctggtggagctggagctacaagcaactgtgaaaactactctgcatattactcttcaaaagcagtaacaagngatcttccacccctctgcctctcctctgcaagaacagcaagtgctcttaacctgttaatcatggagcattttcactagcaaaaaaaaaa

SEQ ID NO: 1309 - DNA, 193 bp, Mus musculus; identical to SEQ ID NO: 1302

SEQ ID NO: 1310 - DNA, 193 bp, Mus musculus
gtctcagaggtcagaagaggtcagtcagctcccctggtggagctggagctacaagcaactgtgaaaactactctgcatattactcttcaaaagcagtaacaagtgatcttccacccctctgcctctcctctgcaagaacagcaagtgctcttaacctgttaatcatggagcattttcactagcaaaaaaaaaa

SEQ ID NO: 1311 - DNA, 193 bp, Mus musculus; identical to SEQ ID NO: 1302

SEQ ID NO: 1312 - DNA, 193 bp, Mus musculus; identical to SEQ ID NO: 1302

SEQ ID NO: 1313 - DNA, 198 bp, Mus musculus
gtctcaagaagtcagaagaggtcaagtcagctcccctggtggagctggagctacaagcaactgtgaaaactactctgcatattactcttcaaaagcagtaacaagtgatcttccacccctctgcctctcctctgcaagaacagcaagtgctcttaacctgttaatcatggagcattttcactagcattaaaaaaaaaa

SEQ ID NO: 1314 - DNA, 193 bp, Mus musculus; identical to SEQ ID NO: 1302

SEQ ID NO: 1315 - DNA, 196 bp, Mus musculus
  misc_feature (1)...(196): n = A,T,C or G
gtctcagaagtcagaagaggtcagtcagctcccctggtggagctggagntacaagcaactgtgaaaactactctgcatattactcttcaaaagcagtaacaagtgatcttccacccctctgcctctcctctgcaagaacagcaagtgctcttaacctgttaatcatggagcattttcactagcattaaaaaaaaaa

SEQ ID NO: 1316 - DNA, 411 bp, Mus musculus
gtgaagaaccaggcagtaggcgagaaaggccccactcaggacagctgagccccagggctgaagcaggagtaaccgacccttctgcctcacccacttcagaagcttctccacaaacaggagcagccaagcagaccagcccctgccccctaaagtggcttcccaaagcggagcacacaggcctgacagctcagcagtgcgaggcgaggtgaggagaggcgaggcggctgcagcctgcggtgaacatctgaactcctcagaggggtaacagacccccccacacacagatgcagcctgagtggcaggaatactgagtctttggagagtggctccctctcagctctgtcacgcaagaacgctctctgcacttgagccattctggcaagtgacttaaagggatttaaaaaaaacaaa

SEQ ID NO: 1317 - DNA, 190 bp, Mus musculus
aaagtcagaagaggtcagtcagctcccctggtggagctggagctacaagcaactgtgaaaactactctgcatattacccttcaaaagcagtaacaagtgatcttccacccctctgcctctcctctgcaagaacagcaagtgctcttaacctgttaatcatggagcattttcactagcattaaaaaaaaaa

SEQ ID NO: 1318 - DNA, 193 bp, Mus musculus; identical to SEQ ID NO: 1302

SEQ ID NO: 1319 - DNA, 193 bp, Mus musculus; identical to SEQ ID NO: 1302

SEQ ID NO: 1320 - DNA, 193 bp, Mus musculus; identical to SEQ ID NO: 1302

SEQ ID NO: 1321 - DNA, 193 bp, Mus musculus; identical to SEQ ID NO: 1302

SEQ ID NO: 1322 - DNA, 193 bp, Mus musculus; identical to SEQ ID NO: 1302

SEQ ID NO: 1323 - DNA, 193 bp, Mus musculus
  misc_feature (1)...(193): n = A,T,C or G
gtctcagaagtcagaagaggtcagtcagctcccctggtggagctggagctacaagcaactgtgaaaactactctgcatattactcttcaaaagcagtaacaagngatcttccacccctctgcctctcctctgcaagaacagcaagtgctcttaacctgttaatcatggagcattttcactagcaaaaaaaaaa

SEQ ID NO: 1324 - DNA, 193 bp, Mus musculus; identical to SEQ ID NO: 1302

SEQ ID NO: 1325 - DNA, 193 bp, Mus musculus; identical to SEQ ID NO: 1302

SEQ ID NO: 1326 - DNA, 196 bp, Mus musculus; identical to SEQ ID NO: 1307

SEQ ID NO: 1327 - DNA, 185 bp, Mus musculus
gtctcagaagtcagaagaggtcaagtcagctcccctggtggagctggagctacaagcaactgtgaaaactactctgcatattactcttcaaaagcagtaacaagtgatcttccacccctctgcctctcctctgcaagaacagcaagtgctcttaacctgttaatcatggagcattttcactagca

SEQ ID NO: 1328 - DNA, 193 bp, Mus musculus; identical to SEQ ID NO: 1302

SEQ ID NO: 1329 - DNA, 193 bp, Mus musculus
  misc_feature (1)...(193): n = A,T,C or G
gtctcagaagtcagaagaggtcagtcagctcccctggtggagctggagctacaagcaactgtgaaaactactctgcatattactcttcaaaagcagtaacaagtgatcttccacccctctgcctctcctctgcaagaacagcaagngctcttaacctgttaatcatggagcattttcactagcaaaaaaaaaa

SEQ ID NO: 1330 - DNA, 193 bp, Mus musculus; identical to SEQ ID NO: 1302

SEQ ID NO: 1331 - DNA, 193 bp, Mus musculus; identical to SEQ ID NO: 1302

SEQ ID NO: 1332 - DNA, 193 bp, Mus musculus; identical to SEQ ID NO: 1302

SEQ ID NO: 1333 - DNA, 196 bp, Mus musculus; identical to SEQ ID NO: 1307

SEQ ID NO: 1334 - DNA, 193 bp, Mus musculus; identical to SEQ ID NO: 1302

SEQ ID NO: 1335 - DNA, 194 bp, Mus musculus
gtctcagaagtcagaagaggtcagtcagctcccctggtggagctggagctacaagcaactgtgaaaactactctgcatattactcttcaaaagcagtaacaagtgatcttccacccctctgcctctcctctgcaagaacagcaagtgctcttaacctgttaatcatggagcattttcactagcattaaaaaaaa

SEQ ID NO: 1336 - DNA, 193 bp, Mus musculus; identical to SEQ ID NO: 1302

SEQ ID NO: 1337 - DNA, 193 bp, Mus musculus; identical to SEQ ID NO: 1302

SEQ ID NO: 1338 - DNA, 193 bp, Mus musculus; identical to SEQ ID NO: 1302

SEQ ID NO: 1339 - DNA, 196 bp, Mus musculus; identical to SEQ ID NO: 1307

SEQ ID NO: 1340 - DNA, 196 bp, Mus musculus; identical to SEQ ID NO: 1307

SEQ ID NO: 1341 - DNA, 193 bp, Mus musculus; identical to SEQ ID NO: 1302

SEQ ID NO: 1342 - DNA, 196 bp, Mus musculus; identical to SEQ ID NO: 1307

SEQ ID NO: 1343 - DNA, 176 bp, Mus musculus
aggtcagtcagctcccctggtggagctggagctacaagcaactgtgaaaactactctgcatattactcttcaaaagcagtaacaagtgatcttccacccctctgcctctcctctgcaagaacagcaagtgctcttaacctgttaatcatggagcattttcactagcaaaaaaaaaa

SEQ ID NO: 1344 - DNA, 193 bp, Mus musculus; identical to SEQ ID NO: 1302

SEQ ID NO: 1345 - DNA, 196 bp, Mus musculus; identical to SEQ ID NO: 1307

SEQ ID NO: 1346 - DNA, 193 bp, Mus musculus; identical to SEQ ID NO: 1302

SEQ ID NO: 1347 - DNA, 193 bp, Mus musculus; identical to SEQ ID NO: 1302

SEQ ID NO: 1348 - DNA, 196 bp, Mus musculus
gtctcagaagtcagaagaggtcagtcagctcccctggtggagctggagctacaagcaactgtgaaaactactctgcatattactcttcaaaagcagtaacaagtgatcttccacccctctgcctctcccctgcaagaacagcaagtgctcttaacctgttaatcatggagcattttcactagcattaaaaaaaaaa

SEQ ID NO: 1349 - DNA, 196 bp, Mus musculus
gtctcagaagtcagaagaggtcagtcagctcccctggtggagctggagctacaagcaactgtgaaaactactccgcatattactcttcaaaagcagtaacaagtgatcttccacccctctgcctctcctctgcaagaacagcaagtgctcttaacctgttaatcatggagcattttcactagcattaaaaaaaaaa

SEQ ID NO: 1350 - DNA, 194 bp, Mus musculus
gtctcagaagtcagaagaggtcaagccagctcccctggtggagctggagctacaagcaactgtgaaaactactctgcatattactcttcaaaagcagtaacaagtgatcttccacccctctgcctctcctctgcaagaacagcaagtgctcttaacctgttaatcatggagcattttcactagcaaaaaaaaaa

SEQ ID NO: 1351 - DNA, 186 bp, Mus musculus
  misc_feature (1)...(186): n = A,T,C or G
aagtcagaagaggtcagtcagctcccctggtggagctggagctacaagcaactgtgaaaactactctgcatattactcttcaaaagcngtaacaagtgatcttccacccctctgcctctcctctgcaagaacagcaagtgctcttaacctgttaatcatggagcattttcactagcaaaaaaaaaa

SEQ ID NO: 1352 - DNA, 184 bp, Mus musculus
gtctcagaagtcagaagaggtcagtcagctcccctggtggagctggagctacaagcaactgtgaaaactactctgcatattactcttcaaaagcagtaacaagtgatcttccacccctctgcctctcctctgcaagaacagcaagtgctcttaacctgttaatcatggagcattttcactagca

SEQ ID NO: 1353 - DNA, 100 bp, Mus musculus
  misc_feature (1)...(100): n = A,T,C or G
gacgtctggggagctcctgcattaagtcagtaactgagntgccctgtacaagactccaacttgttgaaccaccaaaactgcctttggaaaaaaaaaccaa

SEQ ID NO: 1354 - DNA, 424 bp, Mus musculus
  misc_feature (1)...(424): n = A,T,C or G
agcttggaagaagaatccgcaanatgttggggaaatgggaaaaaaaacttcccgtaaacatccaaggtttggatggaanncntcattttantgggacttttntcgaaggggccgttantttgtttncnttnggcnncagcctaggatcagnntcagggnntgggacttnaananagtgggtggaacctgtgntttagnaaaaggtnggngntacctacttcnaacccttttttggagcaaaaggtttcaagccttgggtttaaaagtccaaagccttggaaattggggcctccgcnttggccattttaaaaatgggcgcgccctcggaggggaaatttcggggatcccgngcggcggccatttaaaaatngggccggcttattgggcccaaattctttttggcgttttttaccctggggaaaag

SEQ ID NO: 1355 - DNA, 110 bp, Mus musculus
gattaccagctgctgcccccagaagagccactgtccacagaggaacctgatgcgaaggtttaccaagtagatcccaatggtgaaagccagctacaccccaaaaaaaaaaa

SEQ ID NO: 1356 - DNA, 183 bp, Mus musculus
  misc_feature (1)...(183): n = A,T,C or G
caacctttttgagcaagttcaagcctgggtttaaagtccaagcttgnaattggcctccgcttgggccattttaaaatgggcgcgccctcgagggaaattcgggtatnccngcgccgcccattttaaaantgggccgcctatttngccaaaatcttttttgggntttttacccctttgggaaaa

SEQ ID NO: 1357 - DNA, 257 bp, Mus musculus
  misc_feature (1)...(257): n = A,T,C or G
taagcaatggcatcaaccattcccctcctaccctgaatggtgccccatcgccaaccacattgccggccagcgaggccaattcagcttggacttaaccaggctgaacttgctcaaaaggtggggactacccaanccgggccnnttntggaactngaaaccaancctcnccttttnccaaaggaaagntgntaactnngcctnntnncnngntttntgntaaanattgngttnnaccttttgagcttgtttagtttacc

SEQ ID NO: 1358 - DNA, 132 bp, Mus musculus; identical to SEQ ID NO: 1293

SEQ ID NO: 1359 - DNA, 132 bp, Mus musculus; identical to SEQ ID NO: 1277

SEQ ID NO: 1360 - DNA, 396 bp, Mus musculus
ggtacaaaaatgcagagcaataaagcctttaacttggagaagcagaatcatactccaaggaagcatcatcagcatcaccaccagcagcaccatcagcagcaacagcagcagcagcagcaacagccacccccaccaatacctgcaaatggccagcaggccagcagccagagtaagtagctgctgggtgatgggaggatgcaaacaggttcccctgggaatgattttatagtttttaggcaaatctcttaggattataagtgaacaggcctttggtagcatacttttgtttttactttttttttccgagagagcgtcaagacagggtctctgtgtatccctaactatcatagaactcactctgtaggcaggttccttagaattccaccaaaaaaaaaa

SEQ ID NO: 1361 - DNA, 160 bp, Mus musculus
  misc_feature (1)...(160): n = A,T,C or G
gccttgcataattatctagttctctctctttctctctctnttccccatctctccctctctttctccccaccccggaggtattggtccaatttttcctgtaaggnaaatatttgaatccttcccactttgaattctaaaggaacaaaaaccattgtgaatg

SEQ ID NO: 1362 - DNA, 134 bp, Mus musculus
taagcaatggcatcaaccattcccctcctaccctgaatggtgccccatcgccaaccacattgccggccagcgaggccaattcagcttggacttaaccaggctgaacttgctcaaaaggtggggacaacccaact

SEQ ID NO: 1363 - DNA, 131 bp, Mus musculus
  misc_feature (1)...(131): n = A,T,C or G
taagcaatggcatcaaccattcccctcctaccctgaatggtgccccatcgccaaccacattgccggncagcgaggccaattcagcttggacttaaccaggctgaacttgctcaaaaggtggggactaccca

SEQ ID NO: 1364 - DNA, 132 bp, Mus musculus; identical to SEQ ID NO: 1277

SEQ ID NO: 1365 - DNA, 114 bp, Mus musculus
  misc_feature (1)...(114): n = A,T,C or G
ggaacccttttgagcangntcagcctggttaagtccaagctgaattggccaattcttttgctttttaccctggaagaaatactcataagcnacctctcgtctttaacccccagt

SEQ ID NO: 1366 - DNA, 382 bp, Mus musculus
  misc_feature (1)...(382): n = A,T,C or G
gactgagattatcttgctaatcatggcccgattaaatgaatctgaagccaggagaaaattctggcaaattctgaatgatgaaaaaaataaggnatgctcggaangtnggcgcttcagagacctgaaggcttnnaatctcnngctgnataacatcctgaatatcccaatatgcaggcctcaacagataccangaagactgaaataatcccatatatcctatcagatcacaacggactaagactggtcttaaattccaacaaaaacaatggaagacacacatatacatggaagctgaacaatgctctattcaatgataacttggtcaaggaagaaataaaagaaattaaagactttttttgaatgaaaatcattaaaaaaaaaa

SEQ ID NO: 1367 - DNA, 124 bp, Mus musculus
  misc_feature (1)...(124): n = A,T,C or G
ggtcgcgtagacctacactagctgaggctgctggctgggttcccagtgatggaaancgagctagagaatttatagactctgatttttcagaaagtaaacgaagcaaaaaaggagaaaaaaaaaa

SEQ ID NO: 1368 - DNA, 137 bp, Mus musculus
  misc_feature (1)...(137): n = A,T,C or G
cacagcatggcaacagttttcttgcattgnncaacttcactgcactttccgancttnatccaaatattnctaancgganaannacccgcgaataanaattcgggaaaacagatgtcaaaggctttccagacagaaaa

SEQ ID NO: 1369 - DNA, 102 bp, Mus musculus
  misc_feature (1)...(102): n = A,T,C or G
gggtaccctttttggaaaagatggtgtattaaaccagccaanttntgnctnnggactnatccttttatatactacngttatnacgttggcatgacagccagc

SEQ ID NO: 1370 - DNA, 491 bp, Mus musculus
  misc_feature (1)...(491): n = A,T,C or G
aaggaactgctgacctgggtatgtccgtgttccggctgggtgaccatgtgtggctggaccctccctccagcagcaagactggtgtggccattgggggcattgtcaaagaaacaaaactggnaaagaccttgattgaggatgacnagggcaaggaacactgngtccatgcanaagacctcagcaccctcaggcctatgcacagccaactcagcccaaggagtggntgacatgatccgcctaggggacctgaatgaggctggtgtggtgcacaacctcctgatccggtaccagcagtacaagatctatacctacacaggctccatcctggtggctgtgaacccattccagatgctgcccctgtacaccctggagcaggtacaaatctactacagccgccacatgggcgagctgcctccccacatcttcgccattgccaacagctgctacttcaacatgaagaagaacaagagggaccagtgctgtatcatcag

SEQ ID NO: 1371 - DNA, 134 bp, Mus musculus
ctagactgagacccttggtgctccacttctgagcatctggatgtctctgcagtgttggggtactactagtgtgtctgaagacagctacagtgtactcatatcaaatatataaatatttaggggaaaaaaaaaaa

SEQ ID NO: 1372 - DNA, 453 bp, Mus musculus
  misc_feature (1)...(453): n = A,T,C or G
gtggctgcgtgtccagggtnntgcccagcctggtaagactnaagagcctgtacgtcgcannagcangactnctcancccngcnaganactcccaantgtgantaactagangacttatggtgggcaccannggagnctcagnngagtgnnaggnacagggaagaantgctgccaggacgganngcacaaggaagccnttggctgnctgtaatgngcatcaggaccagaatccaagnataagaggttacgagttctgacagcntctnactgncatcatcagagcagcttatggcacagcctcnanagagatnggcttccantgcttctataggcttgggtagcccagataacagtttaaactgagcagttgacttgagagtntcacctttcctcaaacaaaattctttagggncacaccccaacttacttttaaaagtcaagaccacataacag

SEQ ID NO: 1373 - DNA, 170 bp, Mus musculus
gaactgaggcctcccagatgtgtggaactacccctggctctatagctctttgtcaccgtcttctttctaccttctgagagaccccgaaacccttgccatggaaaagtaccaccgttttggagatgattggagaaggctcttttgggagagtgtataagggccgaaaaaaa

SEQ ID NO: 1374 - DNA, 127 bp, Mus musculus
  misc_feature (1)...(127): n = A,T,C or G
gaatcttgtggagcggctggggatgaggttcggnggcagcagagtgttgccgancatgtgcgaggccccancttccatccctgcaactataagannagaaaataccnctaaaacaggatacgccttg

SEQ ID NO: 1375 - DNA, 300 bp, Mus musculus
  misc_feature (1)...(300): n = A,T,C or G
atgatgccctatttctaggcttcaacctggaganngtagtctgngaggattgttacgntcacgtnaaaactgtcctagaggactcagctgaanaacatgctcnncgattnggatcctatgctaggatcngcnngtaaccanntctgtttgcctgttttggatagnaatgatcccnatttccanatgccttgntcancagntgtnggncttgacgatattatggatgaaggagttgttaaagaaagnggnanngataccattgntgaanaagaattgattntacctaacaggagtttgagg

SEQ ID NO: 1376 - DNA, 408 bp, Mus musculus
  misc_feature (1)...(408): n = A,T,C or G
gaactgagtacccgctgctgccggtcaccgcggganaaccgnccaacccgtctggaaccaccgaatggggcggggcctccgccctcaccgtgaangctctcgggagcatccnaatgccttgaacaaagatggcggacgacgctcaccgnctgaaccaatcggaaggcaacttgttaggacttcggagaacgttgtcgcgagaggagaggaaagggacgttactgtctctctgtgcgtgcctgtgtccgagtgtcgtgagagtanaggggaaaggaacagaacatgtgtgtgtgtgtgtgtaattttagcctgctacttggcatctgaaaatttggggtctaatgtaagagaccgctaggaagccggcgatgggcaatgaattctgctctttgttttgaaaaaaaaaaa

SEQ ID NO: 1377 - DNA, 273 bp, Mus musculus
gactgagcaagacacccatctgcccagcgacttgtgaaagcaaaggtaaaggtttcctgagatgagtcctctcctggctggctctcgctgccctgcatctcgaactccagaccatagaaggaaacaggaccaaaacccctgacccagtcagccttcagagtttctgtttgctatgggacatcaccccatcgtttctaacagtatctggaggaagagagttcacagccaattcctgctaataaagtgcctctctgtaagacaaaaagataaaaa

SEQ ID NO: 1378 - DNA, 116 bp, Mus musculus
gactgagccccctgaggggaattcttgtggagcggctggggatgaggttcggtggcagcagagtgttgccgagcatgtgcgaggccccagcttccatccctgcaactataagaaaa

SEQ ID NO: 1379 - DNA, 413 bp, Mus musculus
  misc_feature (1)...(413): n = A,T,C or G
cttccttgcacagacatttcccaggacccagcttgtngcaaaagagggagctaagaggcacaccgcaggcaccatggtccgcctgttggcctccgaagtacagcagctactccacaacaagtttgtggtcgtccttggggactctgtgcatagggcggtgtacaaggacctggtgctcctgctgcagaaggattgcctgctcactaacaagcagctcaggaccaagggggagctgagctttgagaaggaccagctgaagatgggaggcgagctggataccctgcacaaccgcacggactaccgcgaggtgcgcgagttctgctctgaccaccatctggtgcgcttctacttcctcacgcgggtctactctgagtacatggagagcgtcctagaggagctccaatccggcaatc

SEQ ID NO: 1380 - DNA, 290 bp, Mus musculus
  misc_feature (1)...(290): n = A,T,C or G
gaactgagttgatgtgtctcagtgttttgcctgactgatcatctgtatatcgcgtgagtacctggctgtagnctcccctcccccagcctgaaacctgcttgctcangggtggagcttgccggctctatngatctgccacagcccactgctagaacctgccactttgctgttcggagccgtgcaccgtggncaccctgctattggaccccaagactaantggcgggaatcggncccccttccnctgctttataactgcgngcagaacagtaaaattgagctttgatcagaa

SEQ ID NO: 1381 - DNA, 243 bp, Mus musculus
  misc_feature (1)...(243): n = A,T,C or G
tgaggtagcagatgcggtganggcggcctnataantgacagngggctnggcggacntgngcctnggtggattcatgctctncagaannancgaaacagaagcaatgagcngaatgactgcccagaattttgggctcttcttttgctanagggtngaggagagntgcnttananattactattgctntataattaggtttattttnacaacataccantaaaccactagaaaggaatttttgtg

SEQ ID NO: 1382 - DNA, 292 bp, Mus musculus
  misc_feature (1)...(292): n = A,T,C or G
caagggtttcatgactganngtcagcgggctgntaagattaaacagntgtgcangnnctccnctctgactagantggctacntgctgttnnnctgancctnctttnntgagantttgctncnngantggacancctgaggacttggcgacctagtgctaacagctctgacagactagtgctaacaacttagcagcaaagcatcaagaancctggggtggcaggggatgggcctcccccctttataagagcagactcttagtaaactttgggccatgattggaaaaaaaaaaa

SEQ ID NO: 1383 - DNA, 119 bp, Mus musculus
  misc_feature (1)...(119): n = A,T,C or G
aacttggttgctcaatccctcancatnggaccaagaatacnaanataacaatgtnggcnctgagttantacaaaaggntcctgnatttaactgtcctccttatatatgcccaatgaagg

SEQ ID NO: 1384 - DNA, 160 bp, Mus musculus
  misc_feature (1)...(160): n = A,T,C or G
gcagtatcttccttgntntcaccttgctactgncgagaatgtgnccatcatgnctgangccatgngttggaatgnatacncttgatgcggctacctgcccattncaaccaccangcgaaacattcggatngagcgagcacgtactcggatggaagccggt

SEQ ID NO: 1385 - DNA, 328 bp, Mus musculus
aactgagttgagaggatgcccccacttcaggcgcagcagctgcacttgtccgaagcgtctttgcagatgcagccctgagagcaggagcagcagcttttcttgcaggaggtgcatttgcaggagccggagcaggatccatctgaagcacaggagcagctgggagtccatggggagtggaggcagcagttgaagatcgatgagagatgatgttagagttctaggaggagcgtgagcacaccttgtcttctgacctctatacatgcgcacccaggcatgccccactaccacatatacacaaaataaatgtaaaaacatttaaaaaaaaaaa

SEQ ID NO: 1386 - DNA, 508 bp, Mus musculus
  misc_feature (1)...(508): n = A,T,C or G
gaactgaggcccagagtgatggtgttagtgggagaagcagcatcaggagaacagaagtgccaaagccagaaatagatttgtagagagcagccatccaggaagaactgacctgttaagaagcaaccaatccggggctgttcggttacatcgagtgatgtttttctggacgctgtcttgtgagagggcatgtgacgttttactgaacataaacacttgagcggactcatgatatttaggaagaatataaatagagccccacaaacactgagaaaacgcgcttgcattgcagtaccacgtacttctttgctggtgttcactttgtagagagaaacacaccaaagaacttctcatggtattccggctgattctggccgcttctgctaactggtgccaatttggctgagccttgctgtttctgctggattgngccactactgctgattcatggttggtgtttgctatttaactggactgttggtatccgacaataaagattggaattacccca

SEQ ID NO: 1387 - DNA, 242 bp, Mus musculus
gcatcccaaatgatcctgaactcctgaatctcatgcttctaccttccactgggattacagagaaatggtgctgttggaaaactgctgcctaaacaagcaactggcttcatgaagcagtaacaaaaggatcatcagaactcaatgagagcagactatgacacatttcatttagctgcgaacagagacaaaataatatgcactcttttccagtgaaagatagaaccattatggaaaaaaaaaaa

SEQ ID NO: 1388 - DNA, 345 bp, Mus musculus
ctgaggctgcgcatctggcccaggcaagcttccagtatcgaagctttcggctccaagttcattcttgacctcacactgaacaaccaccatcctggtactttcctgcttatggttcctcagcctaaagactcgccatcctgatctacatcggccagagacgcagagttagtgctgctatcccaagaggcaatacagttgtgccggccctgaacagaaaacctggaagccacaacagagagcaagcatgacagcaaagaatttgtatcaaaatcaaaagaatctaattgccttccagtggcatctctgggcatttcttatccaatacaggatataaaacacaaaaaa

SEQ ID NO: 1389 - DNA, 108 bp, Mus musculus
  misc_feature (1)...(108): n = A,T,C or G
aacagtatcaccccccagcttgcagcttcaagntcnacttcantttgatnnngctatnanttcancattggctcatagagtcaggaacagagtcaatactcaggggct

SEQ ID NO: 1390 - DNA, 179 bp, Mus musculus
  misc_feature (1)...(179): n = A,T,C or G
gaactgaggcaggctttcactatggtagtcttggctagcctggaacacacagagatgtatcttcccctgctgggattaaaggcctagctcacactanccagaattttacagaagaagaaggaggaggaggaggaggaggaggaggagaaggaggagaaggagaggagaaagaagaagaa

SEQ ID NO: 1391 - DNA, 176 bp, Mus musculus
  misc_feature (1)...(176): n = A,T,C or G
tggttaagagcggagactgcttttccagaggttctgagttcanntnctagcaactcacatggttggcgtcacaaccatgtgttatgggattcgtntgtcctcttctggcagtgtactgaagagagtgtacttagcntncattanataaataaataaataaatctttgaataaaaaa

SEQ ID NO: 1392 - DNA, 328 bp, Mus musculus
  misc_feature (1)...(328): n = A,T,C or G
acctacatcagcctggtgtccctagggcactgtatgaacaaacctgagttaatcttcaagntggancnaggactcgggccatggagtgtcncagaancctnanacaggaacctntcagattnttnnatatngactgncccaattgtnaccngncntanaaatcacaaggcntatatgtggcaagcttgaaccacngaatataaggcatcaaatgaaaagattgcaganctaccaggagcaacanaanatccatctgggncaaaatcctgcagaaaganaagcacatgggnaagacatttttatcagaatagnccagatatctggaatt

SEQ ID NO: 1393 - DNA, 277 bp, Mus musculus
  misc_feature (1)...(277): n = A,T,C or G
ttccttataagccaanangagacagcactgtgacagcnccgngacttcacccagcacttaggagacagagaaagctgcaggcntcaatccgatcagaaagcngttcgactgtcctatagcagttacacaccttttgcctagcggatggttggtttgtgcgtcagcttgatagaagctaaagtcattggagagaaaggaggctcaattgtggaaatacctccatgagatccagctataaggcgaaaccccagagaaaccctgtctcgaaaaaccaaaa

SEQ ID NO: 1394 - DNA, 214 bp, Mus musculus
  misc_feature (1)...(214): n = A,T,C or G
gagacagagaaagctgcaggcntcaatccagatcagaaagcngttcgactgtcctatancagntacacaccttttgcctagcggatggtnggnntgtgcgtcagcttgatagaagctaaagtcattggagagaaaggaggctcaattgtggaaatacctccatgagatccagctataaggcgaaaccccagagaaaccctgtctcgaaaaacca

SEQ ID NO: 1395 - DNA, 511 bp, Mus musculus
  misc_feature (1)...(511): n = A,T,C or G
gactgagatctgtgttggtttggagacaaggtccatccaagctgggaagcacttcttgtgttgtttttggaagacagatgctgggcatatgtcaactggcggtctttcctctcatggaaatcacattgaaactccccacaaccacagctctgagcagcgtgggaagacaaagacagctgtgcccgctggcggcctcagatgttcccacagcagcgctacactgcagggtccccagggnnatcaaatatgcagaaggatgttggagtcctttgtatcacagccagaaatgccatgtgctcggcgttggatcgcactgggctcttgttcctgccagtagaagattgtcaacggaacatgtcctctgcacaggaggtggtaaaaatggagccctctatgattctgaggntgatgatctcatctcagaaagactctgacagtgctagtcctggtctggtacttaaaagaaacctgctgccttttctgtttttgaggatgaaaatattgtaagggc

SEQ ID NO: 1396 - DNA, 147 bp, Mus musculus
taaatgcacggaaaatttctttaggatccttgaaagaattctctggcagagagcacatcttgttttcggccggcatttgttcgtcgtcgtcgtcgtcactacctacattcccccgccgtgttcacatatgaaaacaattatttctca

SEQ ID NO: 1397 - DNA, 473 bp, Mus musculus
  misc_feature (1)...(473): n = A,T,C or G
gaactgagctctgtggaaaaggctactttcagatggccaagggctagctagtcagtttcagttggagcacagcctgttggagcaacactgggggtctgctgctctgaatttatgtcttcaacaatcagaccaccttctagcaagacaaagccctccaagaagaaatctgagctgagggtatctagggaccacatataccccccccccantttcaagnaagccattntgtaggaggcaacggngnctgggtcaaannaangggctttgttcccanaccaccaccattncttgnacggtcacaggagcattggcagnttcaccctntgggcctnagtttccatntntggactgctntcctggctcctggttntgggtctggcttgtctttgggggcagcanaaaacgacnccatggctttgtttcgctagctagggggccttgttntccagtctccaactcctccatgtcaaggg

SEQ ID NO: 1398 - DNA, 521 bp, Mus musculus
  misc_feature (1)...(521): n = A,T,C or G
tgagatcccaagactaccagcccagnngatggncccacccacaaggggcctttccctcttcatcactaattgagaaaatgccttacagctggatctcatggaggcatttcctcacctgaagctcctttctcggtgataactgcagctgtgtcaagttgacacacaaaaccagccagtataggtttcttagattaactcaaagaaatgccttttggggactgtctgagaatcatgcatgtgtcaccccatggagactgctgtcttgttcacgaccgcctgcctcatgcattcaggctggtctgaatcctggctctgcagctaaggctgcctgagcttctgatgccgtcaccttcactgtcaccaggattgcagtacctttgtatgcagcgctgggatcaaacttctggcttcctgaactagacaactactctgctgactgaaccatacacccaatccagagcataaccttttggggctatagatatgttttagaagtgactgaagtatgtgccttttcagat

SEQ ID NO: 1399 - DNA, 178 bp, Mus musculus
cctcctcagccagctgggtcagcccagcatcttcgatacccagaaaggggttctctttgttaagccaggctgtcctggaattcaccatgtggagcagggtggccttgaactcaaaaaatccacctgcctcggccttccaaatgttgagattaaagatgtgcaccgtcaaaaaaaaaaa

SEQ ID NO: 1400 - DNA, 242 bp, Mus musculus
gaactgagaatgaattctaccatgtgtaagtcagtgaccctggctgagctttgtggacggagcaccgtgacaccggggcagatcctagagacagtccaacatgacagaaggacataaatgactcttgaaaattgtcctcttacctctgcgtgcacaccggtgacacatctgccagcatgctcacataaatgtaaaagatatgcacaattaccatgtatcaattaaagctaaagttatggaaa

SEQ ID NO: 1401 - DNA, 161 bp, Mus musculus
  misc_feature (1)...(161): n = A,T,C or G
cccatgtggatggggttngtgcctgcctttgaaggtgatcccganccgaactccagaggcacctccttttcatgactcctcacctcccagccgcccntgatgcccattttctgggggnaccatgaagcctcccacatntgaattaccttgccctgtatatt

SEQ ID NO: 1402 - DNA, 346 bp, Mus musculus
gctcgcttctggagagatttgtgagacatgctgatgctgggacaaagaatggtgctgacatgagctttcagagtactctgacaacggtgactgggaagctgttttggacatgtgttcctgccccacccttgcttgcctatattccagattggataaactgccttccttcaagcttttaaaccttgtagggcagagaacatgaagactggaaaccaccttcaaaaacttaatctccttgggaggcagaggcagggagatttctgagttcaaggccagcctggtctacagagtgagttccaggacagccagggctacacagagaaaccctgtcttgaaaaaacaaaaa

SEQ ID NO: 1403 - DNA, 108 bp, Mus musculus
cgggaagtttagagaagctgacaagtacaatttgaacagccaccatcctctgaatgtactggagcaggctactattaaacagtgtgtggtgggacccaaaaaaaaaaa

SEQ ID NO: 1404 - DNA, 206 bp, Mus musculus
  misc_feature (1)...(206): n = A,T,C or G
gactgaggcttggtgcctgcagagncaggagnagagaagacagaggagcatgtcggctcccctgagattggagtgtgaggtcgttgtgagtcaccatgtgcttgctccgaactgaacctaggtcctctgcaggagactcttaattcctgagtcatctctccagcttctggcattagtacttttttaatgtgagaaaattaaaaaaa

SEQ ID NO: 1405 - DNA, 502 bp, Mus musculus
  misc_feature (1)...(502): n = A,T,C or G
gaactgagagttctgatggtcagtcacacanaagncggccttgcgtctgtgggtgttggagactccattctaaagatataaaangtgaaagaggtgatngcaaccnagantccttcttatgctaaggatnctattncagangtggattngagaccatntctgagaccatnnntnctcgngttgtnctggnnnagtatnacgtcaaggaagagctncnctgncntctaacctgcnggtnctacccctnaggtttaatgctgactgcccttccctggatntaaaggagtgtttacacaccagtacctgtgcctcagtaccctgtcaattatgaancagtagcgcgatacagactcaccngctgaatctgtgacttggatgcaaggggctnatgtaaaggancntttaattcctanctttaacttgatccttttgnancttggnaactggaaatttcatttangcanntgcacntgatccctaaaagacacattgcctatccttc

SEQ ID NO: 1406 - DNA, 363 bp, Mus musculus
  misc_feature (1)...(363): n = A,T,C or G
gacgtctggggagctcctgcattaagtcagactgaggngnnnttcgggctgnngnagagnctgcgcngaggccatnnttacttcttgcgnaacctctcnanggncaggacangacgnggcccannaggtctgaactgtcttcagtatcatggagcctcctggagagaagccaggagaggctgaggcgctgagcatcacaccccagctgctgaagtcccactcaggagaatttgccctggattccatcctgttgctgaagcttcggggtttaggggtggtggacctgggttgtttgggggagtgcctgaaccttgagtggcttgacctatcaggcaatgcacttacccacctgggcccactggc

SEQ ID NO: 1407 - DNA, 135 bp, Mus musculus
agactgaggtgttggaagtcaataggtgttctggcttttccagggcttaaatcgggtcattagattaaaatgttcctgatgccaacctcttcagaattaaacagtgggcagaatttcctaacccaaaaaaaaaaa

SEQ ID NO: 1408 - DNA, 150 bp, Mus musculus
  misc_feature (1)...(150): n = A,T,C or G
gaactgagatccagatgnagaactcnaagctcctnctccagnatcatctctgcctacatgctgncctgcttctnaccatgactataatagactaaacctntgcactgtaagccagccccaattaaatattttcctttataaaaaaagaaa

SEQ ID NO: 1409 - DNA, 235 bp, Mus musculus
  misc_feature (1)...(235): n = A,T,C or G
ctgagcgataatggacnagagacctctgagcttcgtacagcgtaggccccacttanaccgnttgncnaggctanaagacataaacaaaacccagcaaaaaacgttatgcaatagaactanntttnaccgggggntctaaaggctgggattataatgagcagaacacagnctgtgttttctgtgttcaaaagcangactgagcattttggngaagatttgggaagaataaaaagca

SEQ ID NO: 1410 - DNA, 482 bp, Mus musculus
  misc_feature (1)...(482): n = A,T,C or G
gactgagggcgccctctgctgtcttcaacttgaagttcagaggagaaaggaaagtccattaacaacaaaggacttgaagaggatgctgactgctaaccaccttcaccacaaacaaccaatgtgattggaaggctgagtcgcttcatttaactggaagttctacagcgtgaggcatcattttaggccacaggaggcacaccagagagcaggctttcttctatccagacagataaacatatgaagacatcggccaaaggaaccaagcccctnttgtgaaaggaatcaaactcagcgcctnctgcatgctagacaagcactctaccactgaatctccatcaagcctagcaattctctgtgtgcaaacagaccgtcgtccctcatttatcgctgcaccactcggtgtggatttgagctgccagctgcttccaacttgaaggtgtattattactaaaatctctgctttgaacaacctgaaaaaaaaa

SEQ ID NO: 1411 - DNA, 564 bp, Mus musculus
  misc_feature (1)...(564): n = A,T,C or G
gaactgaggctggacgacgtggctgcaaaccccagagcgccccattcaaaggctccgctgtatccaggagtgtttttcttcgggtgncatcccgagaccacggtcaccgggttacctgccgggcccacagcgaggcaccttcgtgaaactcgagagctctttctaccgcctcaaccgtgttatgtaagtgcgcaggcctagcacagcccnctctcgcacnatcccctgtanaccgcagctactggagtcttcacccttgacctntaccgagtttgtaactttnctagccttcatcctgattctccggctgtcagcagttccaatccacgcctctncactctnagnttggcactcggctggctatnnttnttttttcctcccctcaaaaactggatcttagctttcctcaatttgttaaatttttaaaaagnttttaaaaatagnncntgactgaccctggaactttgatatgaaaggagtaggaaaagtcatgaggcttgcagcaattcctccctgtttctgaanctctaaaagtnttaccgncccctgaaaggggctggggat

SEQ ID NO: 1412 - DNA, 364 bp, Mus musculus
agactgaggtgagactgagatctccagtccaggatttcccctggtccacgaatcttgttggaatgccttcggagcatcactgatccaggagctgaccttctgtcatttacatggcgtctccttgatgaaatattctccagctgcttaagaacatagtgaacagtttctcacggattccaacttgaacaaaaatcacacctccatccttgttcaacagacccccaaagcatctacttttccaagtacacacactcaggaggcagagccaagtggaccttttgagttcaagcccaacgtggtctacaaagcaagtttcaggacagccagggcttcataaatagatcttgtctcaaataaaaaagaa

SEQ ID NO: 1413 - DNA, 203 bp, Mus musculus
gaactgaggttatactcatggcacctccaagtgaggagacacctctgatccctcagcgctcttgcagcctctcatcctcagaggcaggagccctgcatgtgctccttcctccccggggacctgggcctccccagcgattgtcattctcttttggggactacttggctgaggatttatgtgtgcgagctgccaataaaaaaaaa

SEQ ID NO: 1414 - DNA, 507 bp, Mus musculus
  misc_feature (1)...(507): n = A,T,C or G
gaactgaggtggggatgcccctccttcancacttnggcagtcacgagcggngatgctcttgccaggcaccagttggagctctcggctccctcgtcagggatgggagcccacgtccgcattctgntctcagcactgggactcctggcttgaacccgtgcaggccctgagcctgcgcccacagcctcatgcgagcacagntcatnagtcctcttgngtcctgtcgacacgcangtcaagcctcccactgctttgcttctgagcttggtgnctcacttcctctgaggcccagcgaacccagacaccttctaggaaggtgagaaggcagcactaggaagaccttagatcactttatcaccatttaagctttnccagcccccaacctttttaatttgcatctaccaaccttgaaacatcttnttaggtcctaaaacatgttcttagacccttacaactnaagcttctatatnctcagaccttaaataaactttacactttttttttttttta

SEQ ID NO: 1415 - DNA, 478 bp, Mus musculus
  misc_feature (1)...(478): n = A,T,C or G
gaactgagcactgtaagtctggcatactgtggctcacatctgtaatctcagcacttgggaactaagaaggatttctgtaagtttgaagctagactggaccatagagtgggttctaggctagctgtacagagagaccctacttcaaatcatcatcatcatcatcgtcatcatcgtcgtcgtcgtcgtcgtcgtcgtcatcatcatcatcatcatcatctagcaacagcagcagcanntgctaaaaccaagntnnatttattatnannaagcacacngtagcatggngaagacactcgacaggacgnnntcatatcttattacnnacngattgcatagccnnngngctgtcgcncgngactgganccctactcctgcctnngannagctnngcngtnnnacccacnngactgtctagcnaanccggntngttgacnganaancgagagatgtctcgctgcctcagaataactgcagggct

SEQ ID NO: 1416 - DNA, 332 bp, Mus musculus
gaactgagcctcccccagcccctgaagcaggttgattcagacttgacctcgctgccgctgagcatgagaccacctggggtggagccttccgacctagccggctctattgttctgtcacctgctgctgctcgtctccaagacactgctacctgctgaaaggcccttgagataatctggagacagcatccagccgatcacctactggctggcgaagggcaccaagaatggattgtttggggggggcgggggaggaatggtgggatggggatgggcggcccctctttataagtacagactcttagtaaactttggggccttgaacagaaaaaaaa

SEQ ID NO: 1417 - DNA, 526 bp, Mus musculus
  misc_feature (1)...(526): n = A,T,C or G
gactgaggttttttatttttaggggacctctcagtatggctgcacacaaatttaacctcagccctggggaggcagaaacaggtggatctctgagtttgtgaccagctaagttccaggccagccagagctacntgaagaaatcctgtctgaaaagcangcaaaagaaggaagannagaanttanacactttctccaatgtatnatgaagactaaggacattgtgtggatgaaaaaaagccagtcacagagtgctggctanttttgtatcancttgacacaagctanagtcacttgaaaggagggaatctcanttgcaggaaagccacttaaaaatccagctgtaagacatttccttaattagtggttgacatgggaggactgagcccattgtgagtggtgttatccctggactggtggtcctgggttctataacaaggtagctgagcgagccatagagagcaagctcttgcctccaggttcctgccctgtttgagtttctgccctgacttcttttgatgatgaacag

SEQ ID NO: 1418 - DNA, 175 bp, Mus musculus
gaactgaggaacagggtgaggacatgaaagtgtgacaactgattgaaaaggaagttgacatccatcgtgaacagagaatcctgtgatttggactaatctgtaccctggaaggttatcttgtaccccctgccctccaatgaattgtagataaaggagatgaattgaaaaaaaaaaa

SEQ ID NO: 1419 - DNA, 184 bp, Mus musculus
  misc_feature (1)...(184): n = A,T,C or G
atcttctggtctcggncctgctgtcggacggggaagcttanggggtattagctccagnggaagctgcgctggacgacgtacaaaggaggatctgccgcctgntnttggaagtactgcaggttgagctncagcccctgatntccgntctgccctcgcnccggnggctattgagttctgagttgct

SEQ ID NO: 1420 - DNA, 234 bp, Mus musculus
  misc_feature (1)...(234): n = A,T,C or G
gactgaggttaattttggaatggtgtttggcgtgattgccatgttcagctctttttttctccttggaaaaacactgatgcagactttggcacaaatgatggctgactctccctctccttattcttcctcttcctcttcctcctcttcctcttcctcctcttcctcttcctcctcctctcttcacaatgaacaggtgttgcaagttgtggtnnncggaataaatttacctgtaac

SEQ ID NO: 1421 - DNA, 409 bp, Mus musculus
  misc_feature (1)...(409): n = A,T,C or G
aactgagtcctcgactctggtgagtcantgaaatgtatagctcattgtggccgaagnggacantttcctggaaaacagctggccaaatgcctgcctttnangtgaacatcctcnccggngaaggtctttnttagcaccatccanntnancnctggtcatttctgcagtccaccgttcctgtctatngctnagtaanattntagaaaaatcaggnntgannngagagccaagccttactgctcccaccactgtattcatgccggttctggaaggcgtntcactgnagggcgngnccnataangagcngaccccancccnatncttgntgnctggaagncatgttnntgctagcagccntctagangaaganactctcagctcctcctgtaccatgctttcctggctgctg

SEQ ID NO: 1422 - DNA, 337 bp, Mus musculus
  misc_feature (1)...(337): n = A,T,C or G
aagactgaggtggtagcggtagctgcgagggncctgaaccgggccgaggagttcgcacagaaattcaacatccccaaggcctatggctcttatgaggaactggccaaggacccaaacgaaggangagnncnanntcgncacccagcncccccagcanaagatcaggcagtgctcctactgcttggcagcaggcaaggctgtgtctttgtgagaaacccatgggctgtgaatgcagnanaagttcagggagatggttgccaaagcccgttttnaaggcgncttccttatggaggncgtttgnagccgnttatttcctgcccntgggggctctgaggga

SEQ ID NO: 1423 - DNA, 311 bp, Mus musculus
  misc_feature (1)...(311): n = A,T,C or G
ggagcttcctgctcattngnnctgcnacccccactgctggaacctgangagccacacactgngcncntttntactggaccagaantnntncggntgggaatcagggtcccctcccccttgnttattaactaggtgtctcatcaanaaagattgnncnttgatcagagctnacncaagaagataaaaaatccaacacgttaggangncatggtgcccgtgcccgataccagaaanactaccganangccaatctgaaggatcnntgattacctttgtaataaacatactaggattntaacggtaaaaaaaaa

SEQ ID NO: 1424 - DNA, 222 bp, Mus musculus
aactgaggatagtcttctggaggaacacacccaggaaaagactgagcctccgggtctccaaaagaagagagacaggatgtgaggagaaagccagggctttgtgtgcctggtggatgtcattaaggggaaggcagtctctgctattatgctaatactggccattgcaattttattatgttcattagtctagagtcaaggaataacaccattacaattcttata

SEQ ID NO: 1425 - DNA, 362 bp, Mus musculus
  misc_feature (1)...(362): n = A,T,C or G
agagtgccatgggcangactctcttatgcgcancaaattaccaccttattnnnngcaaggccccagtncgnatggccagaaggnccanacttntactataaccagcaaagtcctnatncccagcagcaggcancttacgcccaacnaccaccatccnanacccctcatgcccangacttcgtatcagcggntgccggagactcagtaaccacagcttcagncttctnagnctccatattgctagcanccattccatcctccnatgagaagtcctnaactccatatgcntcccancatgccanccacacaacancattgcccagaagccagcncctcctacttcacaaacacaggcacaagtc

SEQ ID NO: 1426 - DNA, 167 bp, Mus musculus
  misc_feature (1)...(167): n = A,T,C or G
cctggaactctctatgtagatcaggccatccttgaactcacagagatctatctaccagcctctgcctctggaatgctgggattaaagggacacaccaccataactactacatnatgctaagcaatgngttnagaanatattcctgcggggggtgggcatgggagact

SEQ ID NO: 1427 - DNA, 200 bp, Mus musculus
  misc_feature (1)...(200): n = A,T,C or G
gaactgaggaattaaacccaggacttcagncatgctaatcaggtatgttgctgtttcaggagtctcggtgtcttctggcctccatgagcactgcacagacatgccacacatccatgagtcaaaaaatcaaaacaataacagcaacccttcccccaaaaaaaccccaaaaaatgcatacccaacatattttttttttgaaa

SEQ ID NO: 1428 - DNA, 132 bp, Mus musculus
  misc_feature (1)...(132): n = A,T,C or G
tctagaataaattaccaccctgtggaatgaccnngccngttnctgtgaggangacccncntatgatgggagacatggttctgttngaacancagnnttggcattttatatacaggngaaaaaaaaccacttc

SEQ ID NO: 1429 - DNA, 181 bp, Mus musculus
acaagcgttattgctgtctccattctgaaaaggagtaaaagctatctgtaatcaataccgttacgagtttaaagctttcaggcagaatcacaagtaccttaaggaatcctattctctgtttgattttgattcaatacttggattgcaaacactaaagtgaaccaaatgccaaaaaaaaaaa

SEQ ID NO: 1430 - DNA, 337 bp, Mus musculus
  misc_feature (1)...(337): n = A,T,C or G
ctttgtgactgcactgngatggttggtagnacccanttcttggcccatcgngctgngctggcctcctgcagnccattntttcagcttttctacaaggagcggggaattggacaagagggacctggtgtgtattcacaatgagattgncacggccccancctttgggttgcttttgagactntatgtatgctggccaantggcccttaggggagatactcctctagaagatgtgctggcagctgccagctacttgcacatgaatgacattgttaaggtttgtaagcaacgattgcaggcccgagctctggcagaggcagacagtaccaagaaggaaga

SEQ ID NO: 1431 - DNA, 508 bp, Mus musculus
aactgagagtttggctgagttggaagtgctgtgtactcatctctacgtagggaccgatctcactgaaagaatagaggctgagaaagcactcttggaactgattgacagcccagaatgtctcagcaagtgtcaacttttactagaacaaggaacagtaagtatgagatgggtggctgaccctgacaggccagtgttgatgatattagccggtggtttagctgcggtactcaaagcttttgccacatcttgttgttgttgttttctgtcagacgggttaagcaggaagaactggaaaagctggggagacatacaggaaacagccacaaagtagaaataggcatatggtgaaatagtttttttcgttcttcttggcctggttttatgtcacattttatatgttgattttagcagtgctgggaatgaaccaaggcctcttacatgctaggggagctctctactgccaagttacatccctagccctagcaattacatttcagaaataaaaaaa

SEQ ID NO: 1432 - DNA, 206 bp, Mus musculus
gactgaggcttggtgcctgcagacaaggcagcagagaagacagaggagcatgtcggctcccctgagattggagtgtgaggtcgttgtgagtcaccatgtgcttgctccgaactgaacctaggtcctctgcaggagactcttaattcctgagtcatctctccagcttctggcattagtacttttttaatgtgagaaaattaaaaaaa

SEQ ID NO: 1433 - DNA, 136 bp, Mus musculus
ctgaggtggaaattaccagccccgggtcccacgggggttcaagacctaaactcaactggagaccaggctgtctatgcataacccattgcccccacgtgtgtgtgtgtgtgtgtgtgtgtgtgtgtgtgtgtgtgtg

SEQ ID NO: 1434 - DNA, 466 bp, Mus musculus
  misc_feature (1)...(466): n = A,T,C or G
gagaatgctgggattataggcatggaccacaccagntcnatgtcatgctaaggaacaaacccagagcttcatgcangcaagcaggcatgcaagcaagcaagcaagcaagcaagcagncaacattttaccagctctgttccatccctagcccctttctcttctcctggggctggcgagatggctcanaggttaagagcactgactgcttttccagaggtcctgagttcaaatcccagcaaccacatgatggctcacaaccatctgtaatgagatctgataccctcttctggtgtgtctgaagacagctacactgtacttatgtataataataaatctttgggcaagagcgagcagaaactaagcgagtgcagttgactggagcaagcagaggtcctaaaaattcaaatcccaacaactacatgaaggctcacaaccatctgttnagctacagggtacccatatacat

SEQ ID NO: 1435 - DNA, 102 bp, Mus musculus
  misc_feature (1)...(102): n = A,T,C or G
catatataacagagcctgcctttgagtcatctgctccagnaaagaacgctgntactgtgcngtaaccccagtaaactcattggtctaagccaaaaaaaaaaa

SEQ ID NO: 1436 - DNA, 182 bp, Mus musculus
ggatgagcaggccagctctgctgctctgaaggaacaactgaaaatgaaggaccagtccttgaggaaactgcagcaggaaatggacagtttgacatttcgaaatctgcagcttgccaagagggtggaactccttcaagatgagctagcactaagtgaacctcgaggcaagaaaaacaagaaaa

SEQ ID NO: 1437 - DNA, 404 bp, Mus musculus
  misc_feature (1)...(404): n = A,T,C or G
ctgtttgcctgtgcataanccatagtgacttcgatgnntnctntccgangctcctnntncgcctgggacngtnccataacaaagcangcatggaagggntggatanggagaaaattancaaaattatcatggaagccacaaaggggtccagattttatggaaatgagctcaagaaggaaaagcaagtcaatcaacggattgaaaatatgatgcaacaaaaagctcaaattaccagccagcaactaaggaaagctcaattacaggtntnnattnnngngccngggggaaannggnacaatanntatnnctatcncatgngcnatgctgacatggnctntctntatacagggtgaggnaggaaggactcancccnttgcttacgcatgcncacttctgcttgcgcg

SEQ ID NO: 1438 - DNA, 105 bp, Mus musculus
  misc_feature (1)...(105): n = A,T,C or G
ccaaggggctgaggtctatgctgggcagcggncctatgccaaacctaactggttgncagttggactgtccgagggcagcctcggttttnattgtggatattaatc

SEQ ID NO: 1439 - DNA, 227 bp, Mus musculus
  misc_feature (1)...(227): n = A,T,C or G
agactgaggatgacgtctcgggncagctggtgcagcaggtgctgcgcgacctgcaggaggcagtggagtccgagggcttagagggtctcatcggtgctgccctggaggccaagcaggtcctatcttccttcacccttcccatctgccagaagggcggccctggcgctcaggtgcttggaggtggactcagtggccttgagtctgtacccggaggatgaaaaaaaaaa

SEQ ID NO: 1440 - DNA, 144 bp, Mus musculus
  misc_feature (1)...(144): n = A,T,C or G
aactgagatctatttaaaagattaagtantggactnccananccgatcgnggtggctcacacctttaatgccagcnctccggcaggcanaggcaggctgnttnctgagntcnaggccannctggactacaaagttgatttccat

SEQ ID NO: 1441 - DNA, 472 bp, Mus musculus
  misc_feature (1)...(472): n = A,T,C or G
ttcagggcatctgagacctcttctggnttccttgggcactgnacatacaggtnctcaagntctgcctaggtcctcatacancctgccatgttgccttcggcagactgncttccattgggttgggactacatcacactcgggaaggactactgtnagatgtgcctgccnntattagatgntcttcctggagaatcaagaaggctcaccattgtttatcagatgaaaacccaggnacaacctctantanacttcacctgaagggggngaaagaaccggagatcttcctacaggcagtgccttttgcccccacacaccncacatttgtccagcttncttagnctcagaagaccaggacnagaggaanctctttcctttgatancacccgncacttctcccctaaagtaagaacagactttggagngcctgaacgcctgcncccaagcttgaccatcttngcccagcccgatgaaa

SEQ ID NO: 1442 - DNA, 105 bp, Mus musculus
  misc_feature (1)...(105): n = A,T,C or G
ggataccgatgacacgcccttggctctttctgcngccatacctttgccctggatcgcggagtntaattctttgccaccatagcccaaataaaccctttcatttat

SEQ ID NO: 1443 - DNA, 192 bp, Mus musculus
agactgagctagtggtcaaagttgtatgtgaggctctttcaacgtaaattaacctggattaaaatgagtaaactggagtatgaagagattgcctccgacttaacccctgtggttgaagaattgaaggactcaggctttctacagacagaatctgagttgcaagaactctctgatgtacttgaaaaaaaaaaa

SEQ ID NO: 1444 - DNA, 421 bp, Mus musculus
  misc_feature (1)...(421): n = A,T,C or G
gaactgaggtgccctgctggaggtatgggtggctttccagcagaagtggatttttctgaataaagtgctacatgagatgaagatcgagtttcctgctcctgagctgaatgctcgtttcaaggccatggatgatcagtatcggactctaatgcgcatctctgtggctgacccaatggttctgtcacttatactgcccaacaccaagaggagcccttacttccaaggccagcatctacagcaaatgctgaaagcaggatcaggagagctggaggccatcatcatggctctggaggatgtcctctatggggnangagccaacttcccccgactcttcttcctcagtgacagtgaactggtggccctgtngncngcccctctanatacccgcgaggcccagctatgggcacagccttgttttcct

SEQ ID NO: 1445 - DNA, 105 bp, Mus musculus
  misc_feature (1)...(105): n = A,T,C or G
tgtaaaggagaaacangggcctttctgangcactananggaccnacaactacccagaatgcnatcnggncggcccctnactactgatntctgatcctaacctgca

SEQ ID NO: 1446 - DNA, 107 bp, Mus musculus
  misc_feature (1)...(107): n = A,T,C or G
actgagactgagctttggtggcagncgacaacctttgactgccttcaactggatactgtacagagttcttgcattncttgaaaataacgtataaaaaaatgaaagaa

SEQ ID NO: 1447 - DNA, 320 bp, Mus musculus
gaactgaggaactcacagcccattctccagctcagcaaaaggtccccagtgactcagccttggaactccagcagggagagccatcccaagcctagacagcaggaggcagagagttcaaagacccacgctgggtggagcttcccgctcaatctttctgccatgcctactgctggaacctgcagctttgctggtccgaagccatcgcgtgatcaccctgctactggactccaagattatttggcgggaattgggcccctcccccttcctttataactgagtgccgaaatagtaaaaattgaaccttgagcagaaaaaaaaaa

SEQ ID NO: 1448 - DNA, 400 bp, Mus musculus
  misc_feature (1)...(400): n = A,T,C or G
gaagactgtatcacgtgtttccagtccagtgatgctctgcccaagcacatgggaccaagcagccatgaactgattctcctgaaaccataaaacaaatntttgctacttgaagccaanntnatgagatattgtgatcagngcnccataantaagcaggcngacttaagntatacagaagatgggnttcatgtacttacatataatagataaannaatctttaaaaaaggggggggctngagagatggctcagnggttaagagcactgactgctcttccgaaggtcctgagttcaaatcccagcaaccacatgagggctcacaaccatccataacaagatatgacttcctcttctggngtgtctaaagacagctacagggtacttacatataataaacaaat

SEQ ID NO: 1449 - DNA, 545 bp, Mus musculus
gaactgagggtagctccatgatgtaaagcccttgtcaggctacagatgcatccctagagcattgtgcagagatggacagatagcagacacctcggcaactactcgccagatgatggacttcatcgtgccaaaggagaatgctgccggagaagcagcagagaaagctttggacttctgccatgccttacattagcagtatcttctccaagtcctgacagccagcccccctgggatgccactgaagctctctgaattccggtcactgcttcaccttgggaaggaaggcagccgcagccctccccgagcagtaattgacgtcacggtggtgccaggagctgccccattaatatttaatgtggcctcactgcagcagagatgcaggcaagaggaactggaagggtctatgtctcggctcagtggagccatagggacggcacttatgggaaagggccttcctaagccatccagcctggcagacaagcactgtgccagccctctttagtccctgggcttaactatgaaagagccagggcagcatgtggccc

SEQ ID NO: 1450 - DNA, 550 bp, Mus musculus
  misc_feature (1)...(550): n = A,T,C or G
gaactgaggtacggctttagaacacggtgaaggatacttttcatggtgcagggaaggaaagccaatgcgcagannctanaanattatacnggaaggtngnggctggcatggtggngtacnatgtgcnctnttgancctcaagcctnatggccagnggtttacccccacnanncnantgtgcgaatatataaaancacnttcaccgatngctatcnccttattnnnaatcccaantngtgngagngcaccgngcatgnatagtgntngngcgcttgcntgtgtnattctgaacacatatnacactaatgggtatatatgatatcctagcataccctacttccnancaatgtttacnggggngctggcagaaagcccngagacagangtagtgatccgagacatanatgagagggccatggagctcctgattgactttgcatatacctcccagatcactgtggaagagggcaatgttcagactctcttgcctgctgctttgcctcctccagctggcagaaatacaggaagcctgcttgtgaattcttaaaaa

SEQ ID NO: 1451 - DNA, 329 bp, Mus musculus
  misc_feature (1)...(329): n = A,T,C or G
ggccaggaagaggacaccatatctctnggngantggagnancagacaacagagctgccatgtgagngctganantcggaactccatgttctctgcaggagcaacaagngctcttaaccaccgagccaagccgactccttagctccacattcggaacattgtttcancgttgggagagcttggattcatggggctggagagatggctcaaaggtgcagctgtcaaaagcatgtgactccaggcccagggactccagtgtcctattctaatcccacaggcgtacacgggcacaggtgcatacaggcatgatggtcattaggcataacaaat

SEQ ID NO: 1452 - DNA, 289 bp, Mus musculus
  misc_feature (1)...(289): n = A,T,C or G
gaactgaggtggggtctttnttanaagagcagaagcagaagcanaancagaagcagaagcagangcataancattaagcagaagcagaagcagaagcagaagcngaagcagaagaagaagaagaananggaggaggaggaagaggaggaagaggaggaggaggaggatagatgtntgntggatggatggatctgtgganactgncncacatctnatggnattagacngcaggggtattttatnngctactgntttctttcattcagtaaagttgtgcagtgtatccgaa

SEQ ID NO: 1453 - DNA, 118 bp, Mus musculus
  misc_feature (1)...(118): n = A,T,C or G
attaggatgctagctcaggaccagnccaacactgaatgtanctgtnctgagagaggatgtncncggaggnctgcccnngccgcatatttattntcngtctttgacccatgttaagccg

SEQ ID NO: 1454 - DNA, 465 bp, Mus musculus
  misc_feature (1)...(465): n = A,T,C or G
ttcttctacacacccatgtcccgccgcgaagtggaggacccacaagccatcggatacatttgaccagcagctggatatgaataataaacctgcagtaagtgagagtgtggctgagatgaaggcacaggataaaacagggctggagagatggcctggtgaccaagaggacccattcccagaactcacatggcagctgacacgcatttctaactccaggcctaagggatcttcaggtgattctaatctacaagaagtgtgctgagcacgttgaccttggacttcaaagctatgaagttnngaaaaatggatttcacagtgcngtggtggcacataactttgatcccagcacttgggagacagagacaggtggatttctgagttcnagggcagcctggtttacaaaagtgaatttncaggacagccagagctacacagagaanctcttgtcttcgaaaaacaaaacaa

SEQ ID NO: 1455 - DNA, 395 bp, Mus musculus
gaactgagaagacccgagttcagctcccagaacccaggagcagatggctcacaaatatctgtaacttcagctccaggaaaaccatcatactcttctggcttcctttggtacccaaatacacagaaaacacacacagtcttttaaaaaggaggagggagaggaactaaacagactcggttaaagcactggctgcttctccggtgggccaacgttcaattcccagcacccatatggcagctcgcaactgtcggtaactccagaggatttgacaccctctgctgccctacacagcaccgtgcacaaaagtgatgcacaaccacacatgcaggcaagatacccacacatgaacaaaagaaaataatcaataaaagtaagagagaatgtaaaaaaaaaaa

SEQ ID NO: 1456 - DNA, 539 bp, Mus musculus
  misc_feature (1)...(539): n = A,T,C or G
actgaggtgccagggtgattcggaggagtgggtgccctgccttaaggcccccgggggaacctgccggtgcccgatccaaggcctcgttgaagggcagagctatcggttccgagtacgcgccatcagcaaagccggcaccagtctcccttccaaggcctcagaagcagtttgtcacgggtgactatgatgcagtccagaagaatacagagattccctatgacctgggcagcangatcaccatcagcaagaacgatttcgaagatgctgtgaccattccctcagccccaaccaatggtccatgccagtgagatcagagaagcctatgcggttctgagctgggaggagccacgcccccggggcagagccccgctgacttacactctggaaaagtccgtcatcggtagtggaacctgggaggccatcagcacggaaacacccatcaagtccccaanattcgccctcctggacttagaagaagggggaaattcgtatgtcttcagaagtgaagagcccttggacccagtaccgggatgaagtgg

SEQ ID NO: 1457 - DNA, 268 bp, Mus musculus
  misc_feature (1)...(268): n = A,T,C or G
actgagatattcctggantaggtacagaagctgactgtgtnccgggcctcanagctttgaccacttncagagaatctncagatcacacctctgcgagccacagcacagtgagactggaagtcaacaataggccaggccagaagcccttgtgcaaactgcacctaaagtcagtcagggcagctgcttccgaggaaggggccaggaagtcaggcgattttttttncttttttctnttttactgtacgcacctatttgcaaaaaaataaaa

SEQ ID NO: 1458 - DNA, 108 bp, Mus musculus
  misc_feature (1)...(108): n = A,T,C or G
aggggaagcaggcccagantgtgnntattgggtcctatagggaaccncntgtggnntttctctgatgnttaaatttccttaacaanancggcgctttcccggttaacc

SEQ ID NO: 1459 - DNA, 162 bp, Mus musculus
  misc_feature (1)...(162): n = A,T,C or G
ttgcggactctcaaggatcnnactggaagnatggtgggtgccatanatagtactgcctccagnntgaggaannccatntcngtncccggcggatcnctgtcctattcggaagttcctattctctagaaagtataggaacttctcgacctgcaaaaaaaaaaa

SEQ ID NO: 1460 - DNA, 366 bp, Mus musculus
gactgagatgcctgtggggcatgggggccagcgttatcagacaggcgtgagaactggctgaatgagctaaaaccccaggaatctcagaatcgagattcctgagcaccggggtgctgacaggagtggaaccaatacccgcctgtctctacctgctctggaacaagttaccacgacacccactgaggaccatgggcattggggcttgtagcctaaacacctggagttcttctccatgctaatgaggtgtctagcccagagccctcagccaatgagcttcctttcctgggtattcctcacaaaaggtatgtaaattcctggttcaccccaataaagtattcgcattcacatccaccatcaaaaaaaaaa

SEQ ID NO: 1461 - DNA, 166 bp, Mus musculus
  misc_feature (1)...(166): n = A,T,C or G
ggacgtgatcctggactgctcatcgtaggaacgggaaatgtnncagnntngctcagaggacattgtncttggangacattgntgcgngaaatacgacaatctgnnttttgtggaaaatgactgntnatgaggaaactnngataaggagaaggtcttggaacaagac
